United States Patent Application Publication US 2026/0374842 A1, published November 26, 2026 (application 19/450,456).

The application's sequence listing, which the Patent Office published only in electronic form, follows.

SEQUENCE LISTING (3370 sequences)

SEQ ID NO: 1 - protein, 167 aa, Escherichia coli
  REGION 1..167: note = misc_feature - TadA*7.10 (ecTadA) polypeptide sequence
MSEVEFSHEYWMRHALTLAKRARDEREVPVGAVLVLNNRVIGEGWNRAIGLHDPTAHAEIMALRQGGLVMQNYRLIDATLYVTFEPCVMCAGAMIHSRIGRVVFGVRNAKTGAAGSLMDVLHYPGMNHRVEITEGILADECAALLCYFFRMPRQVFNAQKKAQSSTD

SEQ ID NO: 2 - DNA, 4092 bp, synthetic construct
  misc_feature 1..4092: note = BhCas12b GGSGGS-ABE8-Xten20at P153 polynucleotide sequence
  misc_feature 1..6: note = Kozak sequence
  misc_feature 7..57: note = Sequence encoding N-terminal nuclear localization signal
  misc_feature 58..513: note = Sequence encoding BhCas12b
  misc_feature 514..531: note = Sequence encoding a linker
  misc_feature 532..1029: note = Sequence encoding TadA*8
  misc_feature 1030..1089: note = Sequence encoding Xten20 linker
  misc_feature 1090..3954: note = Sequence encoding BhCas12b
  misc_feature 3955..4002: note = Sequence encoding C-terminal NLS
  misc_feature 4003..4008: note = Sequence encoding GS linker
  misc_feature 4009..4089: note = Sequence encoding 3x hemagglutinin (HA) tag
  source 1..4092: mol_type = other DNA
gccaccatggccccaaagaagaagcggaaggtcggtatccacggagtcccagcagccgccaccagatccttcatcctgaagatcgagcccaacgaggaagtgaagaaaggcctctggaaaacccacgaggtgctgaaccacggaatcgcctactacatgaatatcctgaagctgatccggcaagaggccatctacgagcaccacgagcaggaccccaagaatcccaagaaggtgtccaaggccgagatccaggccgagctgtgggatttcgtgctgaagatgcagaagtgcaacagcttcacacacgaggtggacaaggacgaggtgttcaacatcctgagagagctgtacgaggaactggtgcccagcagcgtggaaaagaagggcgaagccaaccagctgagcaacaagtttctgtaccctctggtggaccccaacagccagtctggaaagggaacagccagcagcggcagaaagcccagatggtacaacctgaagattgccggcgatcccggaggctctggaggaagctccgaagtcgagttttcccatgagtactggatgagacacgcattgactctcgcaaagagggctcgagatgaacgcgaggtgcccgtgggggcagtactcgtgctcaacaatcgcgtaatcggcgaaggttggaatagggcaatcggactccacgaccccactgcacatgcggaaatcatggcccttcgacagggagggcttgtgatgcagaattatcgactttatgatgcgacgctgtacgtcacgtttgaaccttgcgtaatgtgcgcgggagctatgattcactcccgcattggacgagttgtattcggtgttcgcaacgccaagacgggtgccgcaggttcactgatggacgtgctgcatcatccaggcatgaaccaccgggtagaaatcacagaaggcatattggcggacgaatgtgcggcgctgttgtgtcgtttttttcgcatgcccaggcgggtctttaacgcccagaaaaaagcacaatcctctactgacggctcttctggatctgaaacacctggcacaagcgagagcgccacccctgagagctctggctcctgggaagaagagaagaagaagtgggaagaagataagaaaaaggacccgctggccaagatcctgggcaagctggctgagtacggactgatccctctgttcatcccctacaccgacagcaacgagcccatcgtgaaagaaatcaagtggatggaaaagtcccggaaccagagcgtgcggcggctggataaggacatgttcattcaggccctggaacggttcctgagctgggagagctggaacctgaaagtgaaagaggaatacgagaaggtcgagaaagagtacaagaccctggaagagaggatcaaagaggacatccaggctctgaaggctctggaacagtatgagaaagagcggcaagaacagctgctgcgggacaccctgaacaccaacgagtaccggctgagcaagagaggccttagaggctggcgggaaatcatccagaaatggctgaaaatggacgagaacgagccctccgagaagtacctggaagtgttcaaggactaccagcggaagcaccctagagaggccggcgattacagcgtgtacgagttcctgtccaagaaagagaaccacttcatctggcggaatcaccctgagtacccctacctgtacgccaccttctgcgagatcgacaagaaaaagaaggacgccaagcagcaggccaccttcacactggccgatcctatcaatcaccctctgtgggtccgattcgaggaaagaagcggcagcaacctgaacaagtacagaatcctgaccgagcagctgcacaccgagaagctgaagaaaaagctgacagtgcagctggaccggctgatctaccctacagaatctggcggctgggaagagaagggcaaagtggacattgtgctgctgcccagccggcagttctacaaccagatcttcctggacatcgaggaaaagggcaagcacgccttcacctacaaggatgagagcatcaagttccctctgaagggcacactcggcggagccagagtgcagttcgacagagatcacctgagaagataccctcacaaggtggaaagcggcaacgtgggcagaatctacttcaacatgaccgtgaacatcgagcctacagagtccccagtgtccaagtctctgaagatccaccgggacgacttccccaaggtggtcaacttcaagcccaaagaactgaccgagtggatcaaggacagcaagggcaagaaactgaagtccggcatcgagtccctggaaatcggcctgagagtgatgagcatcgacctgggacagagacaggccgctgccgcctctattttcgaggtggtggatcagaagcccgacatcgaaggcaagctgtttttcccaatcaagggcaccgagctgtatgccgtgcacagagccagcttcaacatcaagctgcccggcgagacactggtcaagagcagagaagtgctgcggaaggccagagaggacaatctgaaactgatgaaccagaagctcaacttcctgcggaacgtgctgcacttccagcagttcgaggacatcaccgagagagagaagcgggtcaccaagtggatcagcagacaagagaacagcgacgtgcccctggtgtaccaggatgagctgatccagatccgcgagctgatgtacaagccttacaaggactgggtcgccttcctgaagcagctccacaagagactggaagtcgagatcggcaaagaagtgaagcactggcggaagtccctgagcgacggaagaaagggcctgtacggcatctccctgaagaacatcgacgagatcgatcggacccggaagttcctgctgagatggtccctgaggcctaccgaacctggcgaagtgcgtagactggaacccggccagagattcgccatcgaccagctgaatcacctgaacgccctgaaagaagatcggctgaagaagatggccaacaccatcatcatgcacgccctgggctactgctacgacgtgcggaagaagaaatggcaggctaagaaccccgcctgccagatcatcctgttcgaggatctgagcaactacaacccctacgaggaaaggtcccgcttcgagaacagcaagctcatgaagtggtccagacgcgagatccccagacaggttgcactgcagggcgagatctatggcctgcaagtgggagaagtgggcgctcagttcagcagcagattccacgccaagacaggcagccctggcatcagatgtagcgtcgtgaccaaagagaagctgcaggacaatcggttcttcaagaatctgcagagagagggcagactgaccctggacaaaatcgccgtgctgaaagagggcgatctgtacccagacaaaggcggcgagaagttcatcagcctgagcaaggatcggaagtgcgtgaccacacacgccgacatcaacgccgctcagaacctgcagaagcggttctggacaagaacccacggcttctacaaggtgtactgcaaggcctaccaggtggacggccagaccgtgtacatccctgagagcaaggaccagaagcagaagatcatcgaagagttcggcgagggctacttcattctgaaggacggggtgtacgaatgggtcaacgccggcaagctgaaaatcaagaagggcagctccaagcagagcagcagcgagctggtggatagcgacatcctgaaagacagcttcgacctggcctccgagctgaaaggcgaaaagctgatgctgtacagggaccccagcggcaatgtgttccccagcgacaaatggatggccgctggcgtgttcttcggaaagctggaacgcatcctgatcagcaagctgaccaaccagtactccatcagcaccatcgaggacgacagcagcaagcagtctatgaaaaggccggcggccacgaaaaaggccggccaggcaaaaaagaaaaagggatcctacccatacgatgttccagattacgcttatccctacgacgtgcctgattatgcatacccatatgatgtccccgactatgcctaa

SEQ ID NO: 3 - protein, 1361 aa, synthetic construct
  REGION 1..1361: note = BhCas12b GGSGGS-ABE8-Xten20at P153 polypeptide sequence
MAPKKKRKVGIHGVPAAATRSFILKIEPNEEVKKGLWKTHEVLNHGIAYYMNILKLIRQEAIYEHHEQDPKNPKKVSKAEIQAELWDFVLKMQKCNSFTHEVDKDEVFNILRELYEELVPSSVEKKGEANQLSNKFLYPLVDPNSQSGKGTASSGRKPRWYNLKIAGDPGGSGGSSEVEFSHEYWMRHALTLAKRARDEREVPVGAVLVLNNRVIGEGWNRAIGLHDPTAHAEIMALRQGGLVMQNYRLYDATLYVTFEPCVMCAGAMIHSRIGRVVFGVRNAKTGAAGSLMDVLHHPGMNHRVEITEGILADECAALLCRFFRMPRRVFNAQKKAQSSTDGSSGSETPGTSESATPESSGSWEEEKKKWEEDKKKDPLAKILGKLAEYGLIPLFIPYTDSNEPIVKEIKWMEKSRNQSVRRLDKDMFIQALERFLSWESWNLKVKEEYEKVEKEYKTLEERIKEDIQALKALEQYEKERQEQLLRDTLNTNEYRLSKRGLRGWREIIQKWLKMDENEPSEKYLEVFKDYQRKHPREAGDYSVYEFLSKKENHFIWRNHPEYPYLYATFCEIDKKKKDAKQQATFTLADPINHPLWVRFEERSGSNLNKYRILTEQLHTEKLKKKLTVQLDRLIYPTESGGWEEKGKVDIVLLPSRQFYNQIFLDIEEKGKHAFTYKDESIKFPLKGTLGGARVQFDRDHLRRYPHKVESGNVGRIYFNMTVNIEPTESPVSKSLKIHRDDFPKVVNFKPKELTEWIKDSKGKKLKSGIESLEIGLRVMSIDLGQRQAAAASIFEVVDQKPDIEGKLFFPIKGTELYAVHRASFNIKLPGETLVKSREVLRKAREDNLKLMNQKLNFLRNVLHFQQFEDITEREKRVTKWISRQENSDVPLVYQDELIQIRELMYKPYKDWVAFLKQLHKRLEVEIGKEVKHWRKSLSDGRKGLYGISLKNIDEIDRTRKFLLRWSLRPTEPGEVRRLEPGQRFAIDQLNHLNALKEDRLKKMANTIIMHALGYCYDVRKKKWQAKNPACQIILFEDLSNYNPYEERSRFENSKLMKWSRREIPRQVALQGEIYGLQVGEVGAQFSSRFHAKTGSPGIRCSVVTKEKLQDNRFFKNLQREGRLTLDKIAVLKEGDLYPDKGGEKFISLSKDRKCVTTHADINAAQNLQKRFWTRTHGFYKVYCKAYQVDGQTVYIPESKDQKQKIIEEFGEGYFILKDGVYEWVNAGKLKIKKGSSKQSSSELVDSDILKDSFDLASELKGEKLMLYRDPSGNVFPSDKWMAAGVFFGKLERILISKLTNQYSISTIEDDSSKQSMKRPAATKKAGQAKKKKGSYPYDVPDYAYPYDVPDYAYPYDVPDYA

SEQ ID NO: 4 - DNA, 4092 bp, synthetic construct
  misc_feature 1..4092: note = BhCas12b GGSGGS-ABE8-Xten20at K255 polynucleotide sequence
  misc_feature 1..6: note = Kozak sequence
  misc_feature 7..57: note = Sequence encoding N-terminal nuclear localization signal (NLS)
  misc_feature 58..822: note = Sequence encoding BhCas12b
  misc_feature 823..840: note = Sequence encoding a linker
  misc_feature 841..1338: note = Sequence encoding TadA*8
  misc_feature 1339..1398: note = Sequence encoding Xten20 linker
  misc_feature 1399..3954: note = Sequence encoding BhCas12b
  misc_feature 3955..4002: note = Sequence encoding C-terminal NLS
  misc_feature 4003..4008: note = Sequence encoding a GS linker
  misc_feature 4009..4089: note = Sequence encoding 3x hemagglutinin (HA) tag
  source 1..4092: mol_type = other DNA
gccaccatggccccaaagaagaagcggaaggtcggtatccacggagtcccagcagccgccaccagatccttcatcctgaagatcgagcccaacgaggaagtgaagaaaggcctctggaaaacccacgaggtgctgaaccacggaatcgcctactacatgaatatcctgaagctgatccggcaagaggccatctacgagcaccacgagcaggaccccaagaatcccaagaaggtgtccaaggccgagatccaggccgagctgtgggatttcgtgctgaagatgcagaagtgcaacagcttcacacacgaggtggacaaggacgaggtgttcaacatcctgagagagctgtacgaggaactggtgcccagcagcgtggaaaagaagggcgaagccaaccagctgagcaacaagtttctgtaccctctggtggaccccaacagccagtctggaaagggaacagccagcagcggcagaaagcccagatggtacaacctgaagattgccggcgatccctcctgggaagaagagaagaagaagtgggaagaagataagaaaaaggacccgctggccaagatcctgggcaagctggctgagtacggactgatccctctgttcatcccctacaccgacagcaacgagcccatcgtgaaagaaatcaagtggatggaaaagtcccggaaccagagcgtgcggcggctggataaggacatgttcattcaggccctggaacggttcctgagctgggagagctggaacctgaaagtgaaagaggaatacgagaaggtcgagaaagagtacaagaccctggaagagaggatcaaaggaggctctggaggaagctccgaagtcgagttttcccatgagtactggatgagacacgcattgactctcgcaaagagggctcgagatgaacgcgaggtgcccgtgggggcagtactcgtgctcaacaatcgcgtaatcggcgaaggttggaatagggcaatcggactccacgaccccactgcacatgcggaaatcatggcccttcgacagggagggcttgtgatgcagaattatcgactttatgatgcgacgctgtacgtcacgtttgaaccttgcgtaatgtgcgcgggagctatgattcactcccgcattggacgagttgtattcggtgttcgcaacgccaagacgggtgccgcaggttcactgatggacgtgctgcatcatccaggcatgaaccaccgggtagaaatcacagaaggcatattggcggacgaatgtgcggcgctgttgtgtcgtttttttcgcatgcccaggcgggtctttaacgcccagaaaaaagcacaatcctctactgacggctcttctggatctgaaacacctggcacaagcgagagcgccacccctgagagctctggcgaggacatccaggctctgaaggctctggaacagtatgagaaagagcggcaagaacagctgctgcgggacaccctgaacaccaacgagtaccggctgagcaagagaggccttagaggctggcgggaaatcatccagaaatggctgaaaatggacgagaacgagccctccgagaagtacctggaagtgttcaaggactaccagcggaagcaccctagagaggccggcgattacagcgtgtacgagttcctgtccaagaaagagaaccacttcatctggcggaatcaccctgagtacccctacctgtacgccaccttctgcgagatcgacaagaaaaagaaggacgccaagcagcaggccaccttcacactggccgatcctatcaatcaccctctgtgggtccgattcgaggaaagaagcggcagcaacctgaacaagtacagaatcctgaccgagcagctgcacaccgagaagctgaagaaaaagctgacagtgcagctggaccggctgatctaccctacagaatctggcggctgggaagagaagggcaaagtggacattgtgctgctgcccagccggcagttctacaaccagatcttcctggacatcgaggaaaagggcaagcacgccttcacctacaaggatgagagcatcaagttccctctgaagggcacactcggcggagccagagtgcagttcgacagagatcacctgagaagataccctcacaaggtggaaagcggcaacgtgggcagaatctacttcaacatgaccgtgaacatcgagcctacagagtccccagtgtccaagtctctgaagatccaccgggacgacttccccaaggtggtcaacttcaagcccaaagaactgaccgagtggatcaaggacagcaagggcaagaaactgaagtccggcatcgagtccctggaaatcggcctgagagtgatgagcatcgacctgggacagagacaggccgctgccgcctctattttcgaggtggtggatcagaagcccgacatcgaaggcaagctgtttttcccaatcaagggcaccgagctgtatgccgtgcacagagccagcttcaacatcaagctgcccggcgagacactggtcaagagcagagaagtgctgcggaaggccagagaggacaatctgaaactgatgaaccagaagctcaacttcctgcggaacgtgctgcacttccagcagttcgaggacatcaccgagagagagaagcgggtcaccaagtggatcagcagacaagagaacagcgacgtgcccctggtgtaccaggatgagctgatccagatccgcgagctgatgtacaagccttacaaggactgggtcgccttcctgaagcagctccacaagagactggaagtcgagatcggcaaagaagtgaagcactggcggaagtccctgagcgacggaagaaagggcctgtacggcatctccctgaagaacatcgacgagatcgatcggacccggaagttcctgctgagatggtccctgaggcctaccgaacctggcgaagtgcgtagactggaacccggccagagattcgccatcgaccagctgaatcacctgaacgccctgaaagaagatcggctgaagaagatggccaacaccatcatcatgcacgccctgggctactgctacgacgtgcggaagaagaaatggcaggctaagaaccccgcctgccagatcatcctgttcgaggatctgagcaactacaacccctacgaggaaaggtcccgcttcgagaacagcaagctcatgaagtggtccagacgcgagatccccagacaggttgcactgcagggcgagatctatggcctgcaagtgggagaagtgggcgctcagttcagcagcagattccacgccaagacaggcagccctggcatcagatgtagcgtcgtgaccaaagagaagctgcaggacaatcggttcttcaagaatctgcagagagagggcagactgaccctggacaaaatcgccgtgctgaaagagggcgatctgtacccagacaaaggcggcgagaagttcatcagcctgagcaaggatcggaagtgcgtgaccacacacgccgacatcaacgccgctcagaacctgcagaagcggttctggacaagaacccacggcttctacaaggtgtactgcaaggcctaccaggtggacggccagaccgtgtacatccctgagagcaaggaccagaagcagaagatcatcgaagagttcggcgagggctacttcattctgaaggacggggtgtacgaatgggtcaacgccggcaagctgaaaatcaagaagggcagctccaagcagagcagcagcgagctggtggatagcgacatcctgaaagacagcttcgacctggcctccgagctgaaaggcgaaaagctgatgctgtacagggaccccagcggcaatgtgttccccagcgacaaatggatggccgctggcgtgttcttcggaaagctggaacgcatcctgatcagcaagctgaccaaccagtactccatcagcaccatcgaggacgacagcagcaagcagtctatgaaaaggccggcggccacgaaaaaggccggccaggcaaaaaagaaaaagggatcctacccatacgatgttccagattacgcttatccctacgacgtgcctgattatgcatacccatatgatgtccccgactatgcctaa

SEQ ID NO: 5 - protein, 1361 aa, synthetic construct
  REGION 1..1361: note = BhCas12b GGSGGS-ABE8-Xten20at K255 polypeptide sequence
MAPKKKRKVGIHGVPAAATRSFILKIEPNEEVKKGLWKTHEVLNHGIAYYMNILKLIRQEAIYEHHEQDPKNPKKVSKAEIQAELWDFVLKMQKCNSFTHEVDKDEVFNILRELYEELVPSSVEKKGEANQLSNKFLYPLVDPNSQSGKGTASSGRKPRWYNLKIAGDPSWEEEKKKWEEDKKKDPLAKILGKLAEYGLIPLFIPYTDSNEPIVKEIKWMEKSRNQSVRRLDKDMFIQALERFLSWESWNLKVKEEYEKVEKEYKTLEERIKGGSGGSSEVEFSHEYWMRHALTLAKRARDEREVPVGAVLVLNNRVIGEGWNRAIGLHDPTAHAEIMALRQGGLVMQNYRLYDATLYVTFEPCVMCAGAMIHSRIGRVVFGVRNAKTGAAGSLMDVLHHPGMNHRVEITEGILADECAALLCRFFRMPRRVFNAQKKAQSSTDGSSGSETPGTSESATPESSGEDIQALKALEQYEKERQEQLLRDTLNTNEYRLSKRGLRGWREIIQKWLKMDENEPSEKYLEVFKDYQRKHPREAGDYSVYEFLSKKENHFIWRNHPEYPYLYATFCEIDKKKKDAKQQATFTLADPINHPLWVRFEERSGSNLNKYRILTEQLHTEKLKKKLTVQLDRLIYPTESGGWEEKGKVDIVLLPSRQFYNQIFLDIEEKGKHAFTYKDESIKFPLKGTLGGARVQFDRDHLRRYPHKVESGNVGRIYFNMTVNIEPTESPVSKSLKIHRDDFPKVVNFKPKELTEWIKDSKGKKLKSGIESLEIGLRVMSIDLGQRQAAAASIFEVVDQKPDIEGKLFFPIKGTELYAVHRASFNIKLPGETLVKSREVLRKAREDNLKLMNQKLNFLRNVLHFQQFEDITEREKRVTKWISRQENSDVPLVYQDELIQIRELMYKPYKDWVAFLKQLHKRLEVEIGKEVKHWRKSLSDGRKGLYGISLKNIDEIDRTRKFLLRWSLRPTEPGEVRRLEPGQRFAIDQLNHLNALKEDRLKKMANTIIMHALGYCYDVRKKKWQAKNPACQIILFEDLSNYNPYEERSRFENSKLMKWSRREIPRQVALQGEIYGLQVGEVGAQFSSRFHAKTGSPGIRCSVVTKEKLQDNRFFKNLQREGRLTLDKIAVLKEGDLYPDKGGEKFISLSKDRKCVTTHADINAAQNLQKRFWTRTHGFYKVYCKAYQVDGQTVYIPESKDQKQKIIEEFGEGYFILKDGVYEWVNAGKLKIKKGSSKQSSSELVDSDILKDSFDLASELKGEKLMLYRDPSGNVFPSDKWMAAGVFFGKLERILISKLTNQYSISTIEDDSSKQSMKRPAATKKAGQAKKKKGSYPYDVPDYAYPYDVPDYAYPYDVPDYA

SEQ ID NO: 6 - DNA, 4092 bp, synthetic construct
  misc_feature 1..4092: note = BhCas12b GGSGGS-ABE8-Xten20at D306 polynucleotide sequence
  misc_feature 1..6: note = Kozak sequence
  misc_feature 7..57: note = Sequence encoding N-terminal nuclear localization signal (NLS)
  misc_feature 58..975: note = Sequence encoding BhCas12b
  misc_feature 976..993: note = Sequence encoding a linker
  misc_feature 994..1491: note = Sequence encoding TadA*8
  misc_feature 1492..1551: note = Sequence encoding Xten20 linker
  misc_feature 1552..3954: note = Sequence encoding BhCas12b
  misc_feature 3955..4002: note = Sequence encoding C-terminal NLS
  misc_feature 4003..4008: note = Sequence encoding a GS linker
  misc_feature 4009..4089: note = Sequence encoding 3x hemagglutinin (HA) tag
  source 1..4092: mol_type = other DNA
gccaccatggccccaaagaagaagcggaaggtcggtatccacggagtcccagcagccgccaccagatccttcatcctgaagatcgagcccaacgaggaagtgaagaaaggcctctggaaaacccacgaggtgctgaaccacggaatcgcctactacatgaatatcctgaagctgatccggcaagaggccatctacgagcaccacgagcaggaccccaagaatcccaagaaggtgtccaaggccgagatccaggccgagctgtgggatttcgtgctgaagatgcagaagtgcaacagcttcacacacgaggtggacaaggacgaggtgttcaacatcctgagagagctgtacgaggaactggtgcccagcagcgtggaaaagaagggcgaagccaaccagctgagcaacaagtttctgtaccctctggtggaccccaacagccagtctggaaagggaacagccagcagcggcagaaagcccagatggtacaacctgaagattgccggcgatccctcctgggaagaagagaagaagaagtgggaagaagataagaaaaaggacccgctggccaagatcctgggcaagctggctgagtacggactgatccctctgttcatcccctacaccgacagcaacgagcccatcgtgaaagaaatcaagtggatggaaaagtcccggaaccagagcgtgcggcggctggataaggacatgttcattcaggccctggaacggttcctgagctgggagagctggaacctgaaagtgaaagaggaatacgagaaggtcgagaaagagtacaagaccctggaagagaggatcaaagaggacatccaggctctgaaggctctggaacagtatgagaaagagcggcaagaacagctgctgcgggacaccctgaacaccaacgagtaccggctgagcaagagaggccttagaggctggcgggaaatcatccagaaatggctgaaaatggacggaggctctggaggaagctccgaagtcgagttttcccatgagtactggatgagacacgcattgactctcgcaaagagggctcgagatgaacgcgaggtgcccgtgggggcagtactcgtgctcaacaatcgcgtaatcggcgaaggttggaatagggcaatcggactccacgaccccactgcacatgcggaaatcatggcccttcgacagggagggcttgtgatgcagaattatcgactttatgatgcgacgctgtacgtcacgtttgaaccttgcgtaatgtgcgcgggagctatgattcactcccgcattggacgagttgtattcggtgttcgcaacgccaagacgggtgccgcaggttcactgatggacgtgctgcatcatccaggcatgaaccaccgggtagaaatcacagaaggcatattggcggacgaatgtgcggcgctgttgtgtcgtttttttcgcatgcccaggcgggtctttaacgcccagaaaaaagcacaatcctctactgacggctcttctggatctgaaacacctggcacaagcgagagcgccacccctgagagctctggcgagaacgagccctccgagaagtacctggaagtgttcaaggactaccagcggaagcaccctagagaggccggcgattacagcgtgtacgagttcctgtccaagaaagagaaccacttcatctggcggaatcaccctgagtacccctacctgtacgccaccttctgcgagatcgacaagaaaaagaaggacgccaagcagcaggccaccttcacactggccgatcctatcaatcaccctctgtgggtccgattcgaggaaagaagcggcagcaacctgaacaagtacagaatcctgaccgagcagctgcacaccgagaagctgaagaaaaagctgacagtgcagctggaccggctgatctaccctacagaatctggcggctgggaagagaagggcaaagtggacattgtgctgctgcccagccggcagttctacaaccagatcttcctggacatcgaggaaaagggcaagcacgccttcacctacaaggatgagagcatcaagttccctctgaagggcacactcggcggagccagagtgcagttcgacagagatcacctgagaagataccctcacaaggtggaaagcggcaacgtgggcagaatctacttcaacatgaccgtgaacatcgagcctacagagtccccagtgtccaagtctctgaagatccaccgggacgacttccccaaggtggtcaacttcaagcccaaagaactgaccgagtggatcaaggacagcaagggcaagaaactgaagtccggcatcgagtccctggaaatcggcctgagagtgatgagcatcgacctgggacagagacaggccgctgccgcctctattttcgaggtggtggatcagaagcccgacatcgaaggcaagctgtttttcccaatcaagggcaccgagctgtatgccgtgcacagagccagcttcaacatcaagctgcccggcgagacactggtcaagagcagagaagtgctgcggaaggccagagaggacaatctgaaactgatgaaccagaagctcaacttcctgcggaacgtgctgcacttccagcagttcgaggacatcaccgagagagagaagcgggtcaccaagtggatcagcagacaagagaacagcgacgtgcccctggtgtaccaggatgagctgatccagatccgcgagctgatgtacaagccttacaaggactgggtcgccttcctgaagcagctccacaagagactggaagtcgagatcggcaaagaagtgaagcactggcggaagtccctgagcgacggaagaaagggcctgtacggcatctccctgaagaacatcgacgagatcgatcggacccggaagttcctgctgagatggtccctgaggcctaccgaacctggcgaagtgcgtagactggaacccggccagagattcgccatcgaccagctgaatcacctgaacgccctgaaagaagatcggctgaagaagatggccaacaccatcatcatgcacgccctgggctactgctacgacgtgcggaagaagaaatggcaggctaagaaccccgcctgccagatcatcctgttcgaggatctgagcaactacaacccctacgaggaaaggtcccgcttcgagaacagcaagctcatgaagtggtccagacgcgagatccccagacaggttgcactgcagggcgagatctatggcctgcaagtgggagaagtgggcgctcagttcagcagcagattccacgccaagacaggcagccctggcatcagatgtagcgtcgtgaccaaagagaagctgcaggacaatcggttcttcaagaatctgcagagagagggcagactgaccctggacaaaatcgccgtgctgaaagagggcgatctgtacccagacaaaggcggcgagaagttcatcagcctgagcaaggatcggaagtgcgtgaccacacacgccgacatcaacgccgctcagaacctgcagaagcggttctggacaagaacccacggcttctacaaggtgtactgcaaggcctaccaggtggacggccagaccgtgtacatccctgagagcaaggaccagaagcagaagatcatcgaagagttcggcgagggctacttcattctgaaggacggggtgtacgaatgggtcaacgccggcaagctgaaaatcaagaagggcagctccaagcagagcagcagcgagctggtggatagcgacatcctgaaagacagcttcgacctggcctccgagctgaaaggcgaaaagctgatgctgtacagggaccccagcggcaatgtgttccccagcgacaaatggatggccgctggcgtgttcttcggaaagctggaacgcatcctgatcagcaagctgaccaaccagtactccatcagcaccatcgaggacgacagcagcaagcagtctatgaaaaggccggcggccacgaaaaaggccggccaggcaaaaaagaaaaagggatcctacccatacgatgttccagattacgcttatccctacgacgtgcctgattatgcatacccatatgatgtccccgactatgcctaa

SEQ ID NO: 7 - protein, 1361 aa, synthetic construct
  REGION 1..1361: note = BhCas12b GGSGGS-ABE8-Xten20at D306 polypeptide sequence
MAPKKKRKVGIHGVPAAATRSFILKIEPNEEVKKGLWKTHEVLNHGIAYYMNILKLIRQEAIYEHHEQDPKNPKKVSKAEIQAELWDFVLKMQKCNSFTHEVDKDEVFNILRELYEELVPSSVEKKGEANQLSNKFLYPLVDPNSQSGKGTASSGRKPRWYNLKIAGDPSWEEEKKKWEEDKKKDPLAKILGKLAEYGLIPLFIPYTDSNEPIVKEIKWMEKSRNQSVRRLDKDMFIQALERFLSWESWNLKVKEEYEKVEKEYKTLEERIKEDIQALKALEQYEKERQEQLLRDTLNTNEYRLSKRGLRGWREIIQKWLKMDGGSGGSSEVEFSHEYWMRHALTLAKRARDEREVPVGAVLVLNNRVIGEGWNRAIGLHDPTAHAEIMALRQGGLVMQNYRLYDATLYVTFEPCVMCAGAMIHSRIGRVVFGVRNAKTGAAGSLMDVLHHPGMNHRVEITEGILADECAALLCRFFRMPRRVFNAQKKAQSSTDGSSGSETPGTSESATPESSGENEPSEKYLEVFKDYQRKHPREAGDYSVYEFLSKKENHFIWRNHPEYPYLYATFCEIDKKKKDAKQQATFTLADPINHPLWVRFEERSGSNLNKYRILTEQLHTEKLKKKLTVQLDRLIYPTESGGWEEKGKVDIVLLPSRQFYNQIFLDIEEKGKHAFTYKDESIKFPLKGTLGGARVQFDRDHLRRYPHKVESGNVGRIYFNMTVNIEPTESPVSKSLKIHRDDFPKVVNFKPKELTEWIKDSKGKKLKSGIESLEIGLRVMSIDLGQRQAAAASIFEVVDQKPDIEGKLFFPIKGTELYAVHRASFNIKLPGETLVKSREVLRKAREDNLKLMNQKLNFLRNVLHFQQFEDITEREKRVTKWISRQENSDVPLVYQDELIQIRELMYKPYKDWVAFLKQLHKRLEVEIGKEVKHWRKSLSDGRKGLYGISLKNIDEIDRTRKFLLRWSLRPTEPGEVRRLEPGQRFAIDQLNHLNALKEDRLKKMANTIIMHALGYCYDVRKKKWQAKNPACQIILFEDLSNYNPYEERSRFENSKLMKWSRREIPRQVALQGEIYGLQVGEVGAQFSSRFHAKTGSPGIRCSVVTKEKLQDNRFFKNLQREGRLTLDKIAVLKEGDLYPDKGGEKFISLSKDRKCVTTHADINAAQNLQKRFWTRTHGFYKVYCKAYQVDGQTVYIPESKDQKQKIIEEFGEGYFILKDGVYEWVNAGKLKIKKGSSKQSSSELVDSDILKDSFDLASELKGEKLMLYRDPSGNVFPSDKWMAAGVFFGKLERILISKLTNQYSISTIEDDSSKQSMKRPAATKKAGQAKKKKGSYPYDVPDYAYPYDVPDYAYPYDVPDYA

SEQ ID NO: 8 - DNA, 4092 bp, synthetic construct
  misc_feature 1..4092: note = BhCas12b GGSGGS-ABE8-Xten20at D980 polynucleotide sequence
  misc_feature 1..6: note = Kozak sequence
  misc_feature 7..57: note = Sequence encoding N-terminal nuclear localization signal (NLS)
  misc_feature 58..2997: note = Sequence encoding BhCas12b
  misc_feature 2998..3015: note = Sequence encoding a linker
  misc_feature 3016..3513: note = Sequence encoding TadA*8
  misc_feature 3514..3573: note = Sequence encoding Xten20 linker
  misc_feature 3574..3954: note = Sequence encoding BhCas12b
  misc_feature 3955..4002: note = Sequence encoding C-terminal NLS
  misc_feature 4003..4008: note = Sequence encoding a GS linker
  misc_feature 4009..4089: note = Sequence encoding 3x hemagglutinin (HA) tag
  source 1..4092: mol_type = other DNA
gccaccatggccccaaagaagaagcggaaggtcggtatccacggagtcccagcagccgccaccagatccttcatcctgaagatcgagcccaacgaggaagtgaagaaaggcctctggaaaacccacgaggtgctgaaccacggaatcgcctactacatgaatatcctgaagctgatccggcaagaggccatctacgagcaccacgagcaggaccccaagaatcccaagaaggtgtccaaggccgagatccaggccgagctgtgggatttcgtgctgaagatgcagaagtgcaacagcttcacacacgaggtggacaaggacgaggtgttcaacatcctgagagagctgtacgaggaactggtgcccagcagcgtggaaaagaagggcgaagccaaccagctgagcaacaagtttctgtaccctctggtggaccccaacagccagtctggaaagggaacagccagcagcggcagaaagcccagatggtacaacctgaagattgccggcgatccctcctgggaagaagagaagaagaagtgggaagaagataagaaaaaggacccgctggccaagatcctgggcaagctggctgagtacggactgatccctctgttcatcccctacaccgacagcaacgagcccatcgtgaaagaaatcaagtggatggaaaagtcccggaaccagagcgtgcggcggctggataaggacatgttcattcaggccctggaacggttcctgagctgggagagctggaacctgaaagtgaaagaggaatacgagaaggtcgagaaagagtacaagaccctggaagagaggatcaaagaggacatccaggctctgaaggctctggaacagtatgagaaagagcggcaagaacagctgctgcgggacaccctgaacaccaacgagtaccggctgagcaagagaggccttagaggctggcgggaaatcatccagaaatggctgaaaatggacgagaacgagccctccgagaagtacctggaagtgttcaaggactaccagcggaagcaccctagagaggccggcgattacagcgtgtacgagttcctgtccaagaaagagaaccacttcatctggcggaatcaccctgagtacccctacctgtacgccaccttctgcgagatcgacaagaaaaagaaggacgccaagcagcaggccaccttcacactggccgatcctatcaatcaccctctgtgggtccgattcgaggaaagaagcggcagcaacctgaacaagtacagaatcctgaccgagcagctgcacaccgagaagctgaagaaaaagctgacagtgcagctggaccggctgatctaccctacagaatctggcggctgggaagagaagggcaaagtggacattgtgctgctgcccagccggcagttctacaaccagatcttcctggacatcgaggaaaagggcaagcacgccttcacctacaaggatgagagcatcaagttccctctgaagggcacactcggcggagccagagtgcagttcgacagagatcacctgagaagataccctcacaaggtggaaagcggcaacgtgggcagaatctacttcaacatgaccgtgaacatcgagcctacagagtccccagtgtccaagtctctgaagatccaccgggacgacttccccaaggtggtcaacttcaagcccaaagaactgaccgagtggatcaaggacagcaagggcaagaaactgaagtccggcatcgagtccctggaaatcggcctgagagtgatgagcatcgacctgggacagagacaggccgctgccgcctctattttcgaggtggtggatcagaagcccgacatcgaaggcaagctgtttttcccaatcaagggcaccgagctgtatgccgtgcacagagccagcttcaacatcaagctgcccggcgagacactggtcaagagcagagaagtgctgcggaaggccagagaggacaatctgaaactgatgaaccagaagctcaacttcctgcggaacgtgctgcacttccagcagttcgaggacatcaccgagagagagaagcgggtcaccaagtggatcagcagacaagagaacagcgacgtgcccctggtgtaccaggatgagctgatccagatccgcgagctgatgtacaagccttacaaggactgggtcgccttcctgaagcagctccacaagagactggaagtcgagatcggcaaagaagtgaagcactggcggaagtccctgagcgacggaagaaagggcctgtacggcatctccctgaagaacatcgacgagatcgatcggacccggaagttcctgctgagatggtccctgaggcctaccgaacctggcgaagtgcgtagactggaacccggccagagattcgccatcgaccagctgaatcacctgaacgccctgaaagaagatcggctgaagaagatggccaacaccatcatcatgcacgccctgggctactgctacgacgtgcggaagaagaaatggcaggctaagaaccccgcctgccagatcatcctgttcgaggatctgagcaactacaacccctacgaggaaaggtcccgcttcgagaacagcaagctcatgaagtggtccagacgcgagatccccagacaggttgcactgcagggcgagatctatggcctgcaagtgggagaagtgggcgctcagttcagcagcagattccacgccaagacaggcagccctggcatcagatgtagcgtcgtgaccaaagagaagctgcaggacaatcggttcttcaagaatctgcagagagagggcagactgaccctggacaaaatcgccgtgctgaaagagggcgatctgtacccagacaaaggcggcgagaagttcatcagcctgagcaaggatcggaagtgcgtgaccacacacgccgacatcaacgccgctcagaacctgcagaagcggttctggacaagaacccacggcttctacaaggtgtactgcaaggcctaccaggtggacggaggctctggaggaagctccgaagtcgagttttcccatgagtactggatgagacacgcattgactctcgcaaagagggctcgagatgaacgcgaggtgcccgtgggggcagtactcgtgctcaacaatcgcgtaatcggcgaaggttggaatagggcaatcggactccacgaccccactgcacatgcggaaatcatggcccttcgacagggagggcttgtgatgcagaattatcgactttatgatgcgacgctgtacgtcacgtttgaaccttgcgtaatgtgcgcgggagctatgattcactcccgcattggacgagttgtattcggtgttcgcaacgccaagacgggtgccgcaggttcactgatggacgtgctgcatcatccaggcatgaaccaccgggtagaaatcacagaaggcatattggcggacgaatgtgcggcgctgttgtgtcgtttttttcgcatgcccaggcgggtctttaacgcccagaaaaaagcacaatcctctactgacggctcttctggatctgaaacacctggcacaagcgagagcgccacccctgagagctctggcggccagaccgtgtacatccctgagagcaaggaccagaagcagaagatcatcgaagagttcggcgagggctacttcattctgaaggacggggtgtacgaatgggtcaacgccggcaagctgaaaatcaagaagggcagctccaagcagagcagcagcgagctggtggatagcgacatcctgaaagacagcttcgacctggcctccgagctgaaaggcgaaaagctgatgctgtacagggaccccagcggcaatgtgttccccagcgacaaatggatggccgctggcgtgttcttcggaaagctggaacgcatcctgatcagcaagctgaccaaccagtactccatcagcaccatcgaggacgacagcagcaagcagtctatgaaaaggccggcggccacgaaaaaggccggccaggcaaaaaagaaaaagggatcctacccatacgatgttccagattacgcttatccctacgacgtgcctgattatgcatacccatatgatgtccccgactatgcctaa

SEQ ID NO: 9 - protein, 1361 aa, synthetic construct
  REGION 1..1361: note = BhCas12b GGSGGS-ABE8-Xten20at D980 polypeptide sequence
MAPKKKRKVGIHGVPAAATRSFILKIEPNEEVKKGLWKTHEVLNHGIAYYMNILKLIRQEAIYEHHEQDPKNPKKVSKAEIQAELWDFVLKMQKCNSFTHEVDKDEVFNILRELYEELVPSSVEKKGEANQLSNKFLYPLVDPNSQSGKGTASSGRKPRWYNLKIAGDPSWEEEKKKWEEDKKKDPLAKILGKLAEYGLIPLFIPYTDSNEPIVKEIKWMEKSRNQSVRRLDKDMFIQALERFLSWESWNLKVKEEYEKVEKEYKTLEERIKEDIQALKALEQYEKERQEQLLRDTLNTNEYRLSKRGLRGWREIIQKWLKMDENEPSEKYLEVFKDYQRKHPREAGDYSVYEFLSKKENHFIWRNHPEYPYLYATFCEIDKKKKDAKQQATFTLADPINHPLWVRFEERSGSNLNKYRILTEQLHTEKLKKKLTVQLDRLIYPTESGGWEEKGKVDIVLLPSRQFYNQIFLDIEEKGKHAFTYKDESIKFPLKGTLGGARVQFDRDHLRRYPHKVESGNVGRIYFNMTVNIEPTESPVSKSLKIHRDDFPKVVNFKPKELTEWIKDSKGKKLKSGIESLEIGLRVMSIDLGQRQAAAASIFEVVDQKPDIEGKLFFPIKGTELYAVHRASFNIKLPGETLVKSREVLRKAREDNLKLMNQKLNFLRNVLHFQQFEDITEREKRVTKWISRQENSDVPLVYQDELIQIRELMYKPYKDWVAFLKQLHKRLEVEIGKEVKHWRKSLSDGRKGLYGISLKNIDEIDRTRKFLLRWSLRPTEPGEVRRLEPGQRFAIDQLNHLNALKEDRLKKMANTIIMHALGYCYDVRKKKWQAKNPACQIILFEDLSNYNPYEERSRFENSKLMKWSRREIPRQVALQGEIYGLQVGEVGAQFSSRFHAKTGSPGIRCSVVTKEKLQDNRFFKNLQREGRLTLDKIAVLKEGDLYPDKGGEKFISLSKDRKCVTTHADINAAQNLQKRFWTRTHGFYKVYCKAYQVDGGSGGSSEVEFSHEYWMRHALTLAKRARDEREVPVGAVLVLNNRVIGEGWNRAIGLHDPTAHAEIMALRQGGLVMQNYRLYDATLYVTFEPCVMCAGAMIHSRIGRVVFGVRNAKTGAAGSLMDVLHHPGMNHRVEITEGILADECAALLCRFFRMPRRVFNAQKKAQSSTDGSSGSETPGTSESATPESSGGQTVYIPESKDQKQKIIEEFGEGYFILKDGVYEWVNAGKLKIKKGSSKQSSSELVDSDILKDSFDLASELKGEKLMLYRDPSGNVFPSDKWMAAGVFFGKLERILISKLTNQYSISTIEDDSSKQSMKRPAATKKAGQAKKKKGSYPYDVPDYAYPYDVPDYAYPYDVPDYA

SEQ ID NO: 10 - DNA, 4092 bp, synthetic construct
  misc_feature 1..4092: note = BhCas12b GGSGGS-ABE8-Xten20at K1019 polynucleotide sequence
  misc_feature 1..6: note = Kozak sequence
  misc_feature 7..57: note = Sequence encoding N-terminal nuclear localization signal (NLS)
  misc_feature 58..3114: note = Sequence encoding BhCas12b
  misc_feature 3115..3132: note = Sequence encoding a linker
  misc_feature 3133..3630: note = Sequence encoding TadA*8
  misc_feature 3631..3690: note = Sequence encoding Xten20 linker
  misc_feature 3691..3954: note = Sequence encoding BhCas12b
  misc_feature 3955..4002: note = Sequence encoding C-terminal NLS
  misc_feature 4003..4008: note = Sequence encoding GS linker
  misc_feature 4009..4089: note = Sequence encoding 3x hemagglutinin (HA) tag
  source 1..4092: mol_type = other DNA
gccaccatggccccaaagaagaagcggaaggtcggtatccacggagtcccagcagccgccaccagatccttcatcctgaagatcgagcccaacgaggaagtgaagaaaggcctctggaaaacccacgaggtgctgaaccacggaatcgcctactacatgaatatcctgaagctgatccggcaagaggccatctacgagcaccacgagcaggaccccaagaatcccaagaaggtgtccaaggccgagatccaggccgagctgtgggatttcgtgctgaagatgcagaagtgcaacagcttcacacacgaggtggacaaggacgaggtgttcaacatcctgagagagctgtacgaggaactggtgcccagcagcgtggaaaagaagggcgaagccaaccagctgagcaacaagtttctgtaccctctggtggaccccaacagccagtctggaaagggaacagccagcagcggcagaaagcccagatggtacaacctgaagattgccggcgatccctcctgggaagaagagaagaagaagtgggaagaagataagaaaaaggacccgctggccaagatcctgggcaagctggctgagtacggactgatccctctgttcatcccctacaccgacagcaacgagcccatcgtgaaagaaatcaagtggatggaaaagtcccggaaccagagcgtgcggcggctggataaggacatgttcattcaggccctggaacggttcctgagctgggagagctggaacctgaaagtgaaagaggaatacgagaaggtcgagaaagagtacaagaccctggaagagaggatcaaagaggacatccaggctctgaaggctctggaacagtatgagaaagagcggcaagaacagctgctgcgggacaccctgaacaccaacgagtaccggctgagcaagagaggccttagaggctggcgggaaatcatccagaaatggctgaaaatggacgagaacgagccctccgagaagtacctggaagtgttcaaggactaccagcggaagcaccctagagaggccggcgattacagcgtgtacgagttcctgtccaagaaagagaaccacttcatctggcggaatcaccctgagtacccctacctgtacgccaccttctgcgagatcgacaagaaaaagaaggacgccaagcagcaggccaccttcacactggccgatcctatcaatcaccctctgtgggtccgattcgaggaaagaagcggcagcaacctgaacaagtacagaatcctgaccgagcagctgcacaccgagaagctgaagaaaaagctgacagtgcagctggaccggctgatctaccctacagaatctggcggctgggaagagaagggcaaagtggacattgtgctgctgcccagccggcagttctacaaccagatcttcctggacatcgaggaaaagggcaagcacgccttcacctacaaggatgagagcatcaagttccctctgaagggcacactcggcggagccagagtgcagttcgacagagatcacctgagaagataccctcacaaggtggaaagcggcaacgtgggcagaatctacttcaacatgaccgtgaacatcgagcctacagagtccccagtgtccaagtctctgaagatccaccgggacgacttccccaaggtggtcaacttcaagcccaaagaactgaccgagtggatcaaggacagcaagggcaagaaactgaagtccggcatcgagtccctggaaatcggcctgagagtgatgagcatcgacctgggacagagacaggccgctgccgcctctattttcgaggtggtggatcagaagcccgacatcgaaggcaagctgtttttcccaatcaagggcaccgagctgtatgccgtgcacagagccagcttcaacatcaagctgcccggcgagacactggtcaagagcagagaagtgctgcggaaggccagagaggacaatctgaaactgatgaaccagaagctcaacttcctgcggaacgtgctgcacttccagcagttcgaggacatcaccgagagagagaagcgggtcaccaagtggatcagcagacaagagaacagcgacgtgcccctggtgtaccaggatgagctgatccagatccgcgagctgatgtacaagccttacaaggactgggtcgccttcctgaagcagctccacaagagactggaagtcgagatcggcaaagaagtgaagcactggcggaagtccctgagcgacggaagaaagggcctgtacggcatctccctgaagaacatcgacgagatcgatcggacccggaagttcctgctgagatggtccctgaggcctaccgaacctggcgaagtgcgtagactggaacccggccagagattcgccatcgaccagctgaatcacctgaacgccctgaaagaagatcggctgaagaagatggccaacaccatcatcatgcacgccctgggctactgctacgacgtgcggaagaagaaatggcaggctaagaaccccgcctgccagatcatcctgttcgaggatctgagcaactacaacccctacgaggaaaggtcccgcttcgagaacagcaagctcatgaagtggtccagacgcgagatccccagacaggttgcactgcagggcgagatctatggcctgcaagtgggagaagtgggcgctcagttcagcagcagattccacgccaagacaggcagccctggcatcagatgtagcgtcgtgaccaaagagaagctgcaggacaatcggttcttcaagaatctgcagagagagggcagactgaccctggacaaaatcgccgtgctgaaagagggcgatctgtacccagacaaaggcggcgagaagttcatcagcctgagcaaggatcggaagtgcgtgaccacacacgccgacatcaacgccgctcagaacctgcagaagcggttctggacaagaacccacggcttctacaaggtgtactgcaaggcctaccaggtggacggccagaccgtgtacatccctgagagcaaggaccagaagcagaagatcatcgaagagttcggcgagggctacttcattctgaaggacggggtgtacgaatgggtcaacgccggcaagggaggctctggaggaagctccgaagtcgagttttcccatgagtactggatgagacacgcattgactctcgcaaagagggctcgagatgaacgcgaggtgcccgtgggggcagtactcgtgctcaacaatcgcgtaatcggcgaaggttggaatagggcaatcggactccacgaccccactgcacatgcggaaatcatggcccttcgacagggagggcttgtgatgcagaattatcgactttatgatgcgacgctgtacgtcacgtttgaaccttgcgtaatgtgcgcgggagctatgattcactcccgcattggacgagttgtattcggtgttcgcaacgccaagacgggtgccgcaggttcactgatggacgtgctgcatcatccaggcatgaaccaccgggtagaaatcacagaaggcatattggcggacgaatgtgcggcgctgttgtgtcgtttttttcgcatgcccaggcgggtctttaacgcccagaaaaaagcacaatcctctactgacggctcttctggatctgaaacacctggcacaagcgagagcgccacccctgagagctctggcctgaaaatcaagaagggcagctccaagcagagcagcagcgagctggtggatagcgacatcctgaaagacagcttcgacctggcctccgagctgaaaggcgaaaagctgatgctgtacagggaccccagcggcaatgtgttccccagcgacaaatggatggccgctggcgtgttcttcggaaagctggaacgcatcctgatcagcaagctgaccaaccagtactccatcagcaccatcgaggacgacagcagcaagcagtctatgaaaaggccggcggccacgaaaaaggccggccaggcaaaaaagaaaaagggatcctacccatacgatgttccagattacgcttatccctacgacgtgcctgattatgcatacccatatgatgtccccgactatgcctaa

SEQ ID NO: 11 - protein, 1361 aa, synthetic construct
  REGION 1..1361: note = BhCas12b GGSGGS-ABE8-Xten20at K1019 polypeptide sequence
MAPKKKRKVGIHGVPAAATRSFILKIEPNEEVKKGLWKTHEVLNHGIAYYMNILKLIRQEAIYEHHEQDPKNPKKVSKAEIQAELWDFVLKMQKCNSFTHEVDKDEVFNILRELYEELVPSSVEKKGEANQLSNKFLYPLVDPNSQSGKGTASSGRKPRWYNLKIAGDPSWEEEKKKWEEDKKKDPLAKILGKLAEYGLIPLFIPYTDSNEPIVKEIKWMEKSRNQSVRRLDKDMFIQALERFLSWESWNLKVKEEYEKVEKEYKTLEERIKEDIQALKALEQYEKERQEQLLRDTLNTNEYRLSKRGLRGWREIIQKWLKMDENEPSEKYLEVFKDYQRKHPREAGDYSVYEFLSKKENHFIWRNHPEYPYLYATFCEIDKKKKDAKQQATFTLADPINHPLWVRFEERSGSNLNKYRILTEQLHTEKLKKKLTVQLDRLIYPTESGGWEEKGKVDIVLLPSRQFYNQIFLDIEEKGKHAFTYKDESIKFPLKGTLGGARVQFDRDHLRRYPHKVESGNVGRIYFNMTVNIEPTESPVSKSLKIHRDDFPKVVNFKPKELTEWIKDSKGKKLKSGIESLEIGLRVMSIDLGQRQAAAASIFEVVDQKPDIEGKLFFPIKGTELYAVHRASFNIKLPGETLVKSREVLRKAREDNLKLMNQKLNFLRNVLHFQQFEDITEREKRVTKWISRQENSDVPLVYQDELIQIRELMYKPYKDWVAFLKQLHKRLEVEIGKEVKHWRKSLSDGRKGLYGISLKNIDEIDRTRKFLLRWSLRPTEPGEVRRLEPGQRFAIDQLNHLNALKEDRLKKMANTIIMHALGYCYDVRKKKWQAKNPACQIILFEDLSNYNPYEERSRFENSKLMKWSRREIPRQVALQGEIYGLQVGEVGAQFSSRFHAKTGSPGIRCSVVTKEKLQDNRFFKNLQREGRLTLDKIAVLKEGDLYPDKGGEKFISLSKDRKCVTTHADINAAQNLQKRFWTRTHGFYKVYCKAYQVDGQTVYIPESKDQKQKIIEEFGEGYFILKDGVYEWVNAGKGGSGGSSEVEFSHEYWMRHALTLAKRARDEREVPVGAVLVLNNRVIGEGWNRAIGLHDPTAHAEIMALRQGGLVMQNYRLYDATLYVTFEPCVMCAGAMIHSRIGRVVFGVRNAKTGAAGSLMDVLHHPGMNHRVEITEGILADECAALLCRFFRMPRRVFNAQKKAQSSTDGSSGSETPGTSESATPESSGLKIKKGSSKQSSSELVDSDILKDSFDLASELKGEKLMLYRDPSGNVFPSDKWMAAGVFFGKLERILISKLTNQYSISTIEDDSSKQSMKRPAATKKAGQAKKKKGSYPYDVPDYAYPYDVPDYAYPYDVPDYA

SEQ ID NO: 12 - protein, 208 aa, Petromyzon marinus
  REGION 1..208: note = MISC_FEATURE - tr|A5H718|A5H718_PETMA Cytosine deaminase OS=Petromyzon marinusOX=7757 PE=2 SV=1 amino acid sequence; PmCDA1 polypeptide sequence
MTDAEYVRIHEKLDIYTFKKQFFNNKKSVSHRCYVLFELKRRGERRACFWGYAVNKPQSGTERGIHAEIFSIRKVEEYLRDNPGQFTINWYSSWSPCADCAEKILEWYNQELRGNGHTLKIWACKLYYEKNARNQIGLWNLRDNGVGLNVMVSEHYQCCRKIFIQSSHNQLNENRWLEKTLKRAEKRRSELSIMIQVKILHTTKSPAV

SEQ ID NO: 13 - DNA, 766 bp, Petromyzon marinus
  misc_feature 1..766: note = EF094822.1 Petromyzon marinus isolate PmCDA.21 cytosine deaminase mRNA, complete cds; PmCDA1 polynucleotide sequence
  source 1..766: mol_type = genomic DNA
tgacacgacacagccgtgtatatgaggaagggtagctggatggggggggggggaatacgttcagagaggacattagcgagcgtcttgttggtggccttgagtctagacacctgcagacatgaccgacgctgagtacgtgagaatccatgagaagttggacatctacacgtttaagaaacagtttttcaacaacaaaaaatccgtgtcgcatagatgctacgttctctttgaattaaaacgacggggtgaacgtagagcgtgtttttggggctatgctgtgaataaaccacagagcgggacagaacgtggaattcacgccgaaatctttagcattagaaaagtcgaagaatacctgcgcgacaaccccggacaattcacgataaattggtactcatcctggagtccttgtgcagattgcgctgaaaagatcttagaatggtataaccaggagctgcgggggaacggccacactttgaaaatctgggcttgcaaactctattacgagaaaaatgcgaggaatcaaattgggctgtggaacctcagagataacggggttgggttgaatgtaatggtaagtgaacactaccaatgttgcaggaaaatattcatccaatcgtcgcacaatcaattgaatgagaatagatggcttgagaagactttgaagcgagctgaaaaacgacggagcgagttgtccattatgattcaggtaaaaatactccacaccactaagagtcctgctgtttaagaggctatgcggatggttttc

SEQ ID NO: 14 - protein, 145 aa, Homo sapiens
  REGION 1..145: note = MISC_FEATURE - tr|Q6QJ80|Q6QJ80_HUMAN Activation-induced cytidine deaminase OS=Homo sapiens; OX = 9606 GN=AICDA PE=2 SV=1; AID polypeptide sequence
MDSLLMNRRKFLYQFKNVRWAKGRRETYLCYVVKRRDSATSFSLDFGYLRNKNGCHVELLFLRYISDWDLDPGRCYRVTWFTSWSPCYDCARHVADFLRGNPNLSLRIFTARLYFCEDRKAEPEGLRRLHRAGVQIAIMTFKAPV

SEQ ID NO: 15 - DNA, 10681 bp, Homo sapiens
  misc_feature 1..10681: note = NG_011588.1:5001-15681 Homo sapiens activation induced cytidine deaminase (AICDA), RefSeqGene (LRG_17) on chromosome 12; nucleic acid sequence of the CDS of human AID; polynucleotide sequence
  source 1..10681: mol_type = genomic DNA
agagaaccatcattaattgaagtgagatttttctggcctgagacttgcagggaggcaagaagacactctggacaccactatggacaggtaaagaggcagtcttctcgtgggtgattgcactggccttcctctcagagcaaatctgagtaatgagactggtagctatccctttctctcatgtaactgtctgactgataagatcagcttgatcaatatgcatatatattttttgatctgtctccttttcttctattcagatcttatacgctgtcagcccaattctttctgtttcagacttctcttgatttccctctttttcatgtggcaaaagaagtagtgcgtacaatgtactgattcgtcctgagatttgtaccatggttgaaactaatttatggtaataatattaacatagcaaatctttagagactcaaatcatgaaaaggtaatagcagtactgtactaaaaacggtagtgctaattttcgtaataattttgtaaatattcaacagtaaaacaacttgaagacacactttcctagggaggcgttactgaaataatttagctatagtaagaaaatttgtaattttagaaatgccaagcattctaaattaattgcttgaaagtcactatgattgtgtccattataaggagacaaattcattcaagcaagttatttaatgttaaaggcccaattgttaggcagttaatggcacttttactattaactaatctttccatttgttcagacgtagcttaacttacctcttaggtgtgaatttggttaaggtcctcataatgtctttatgtgcagtttttgataggttattgtcatagaacttattctattcctacatttatgattactatggatgtatgagaataacacctaatccttatactttacctcaatttaactcctttataaagaacttacattacagaataaagattttttaaaaatatatttttttgtagagacagggtcttagcccagccgaggctggtctctaagtcctggcccaagcgatcctcctgcctgggcctcctaaagtgctggaattatagacatgagccatcacatccaatatacagaataaagatttttaatggaggatttaatgttcttcagaaaattttcttgaggtcagacaatgtcaaatgtctcctcagtttacactgagattttgaaaacaagtctgagctataggtccttgtgaagggtccattggaaatacttgttcaaagtaaaatggaaagcaaaggtaaaatcagcagttgaaattcagagaaagacagaaaaggagaaaagatgaaattcaacaggacagaagggaaatatattatcattaaggaggacagtatctgtagagctcattagtgatggcaaaatgacttggtcaggattatttttaacccgcttgtttctggtttgcacggctggggatgcagctagggttctgcctcagggagcacagctgtccagagcagctgtcagcctgcaagcctgaaacactccctcggtaaagtccttcctactcaggacagaaatgacgagaacagggagctggaaacaggcccctaaccagagaagggaagtaatggatcaacaaagttaactagcaggtcaggatcacgcaattcatttcactctgactggtaacatgtgacagaaacagtgtaggcttattgtattttcatgtagagtaggacccaaaaatccacccaaagtcctttatctatgccacatccttcttatctatacttccaggacactttttcttccttatgataaggctctctctctctccacacacacacacacacacacacacacacacacacacacacacacaaacacacaccccgccaaccaaggtgcatgtaaaaagatgtagattcctctgcctttctcatctacacagcccaggagggtaagttaatataagagggatttattggtaagagatgatgcttaatctgtttaacactgggcctcaaagagagaatttcttttcttctgtacttattaagcacctattatgtgttgagcttatatatacaaagggttattatatgctaatatagtaatagtaatggtggttggtactatggtaattaccataaaaattattatccttttaaaataaagctaattattattggatcttttttagtattcattttatgttttttatgtttttgattttttaaaagacaatctcaccctgttacccaggctggagtgcagtggtgcaatcatagctttctgcagtcttgaactcctgggctcaagcaatcctcctgccttggcctcccaaagtgttgggatacagtcatgagccactgcatctggcctaggatccatttagattaaaatatgcattttaaattttaaaataatatggctaatttttaccttatgtaatgtgtatactggcaataaatctagtttgctgcctaaagtttaaagtgctttccagtaagcttcatgtacgtgaggggagacatttaaagtgaaacagacagccaggtgtggtggctcacgcctgtaatcccagcactctgggaggctgaggtgggtggatcgcttgagccctggagttcaagaccagcctgagcaacatggcaaaacgctgtttctataacaaaaattagccgggcatggtggcatgtgcctgtggtcccagctactagggggctgaggcaggagaatcgttggagcccaggaggtcaaggctgcactgagcagtgcttgcgccactgcactccagcctgggtgacaggaccagaccttgcctcaaaaaaataagaagaaaaattaaaaataaatggaaacaactacaaagagctgttgtcctagatgagctacttagttaggctgatattttggtatttaacttttaaagtcagggtctgtcacctgcactacattattaaaatatcaattctcaatgtatatccacacaaagactggtacgtgaatgttcatagtacctttattcacaaaaccccaaagtagagactatccaaatatccatcaacaagtgaacaaataaacaaaatgtgctatatccatgcaatggaataccaccctgcagtacaaagaagctacttggggatgaatcccaaagtcatgacgctaaatgaaagagtcagacatgaaggaggagataatgtatgccatacgaaattctagaaaatgaaagtaacttatagttacagaaagcaaatcagggcaggcatagaggctcacacctgtaatcccagcactttgagaggccacgtgggaagattgctagaactcaggagttcaagaccagcctgggcaacacagtgaaactccattctccacaaaaatgggaaaaaaagaaagcaaatcagtggttgtcctgtggggaggggaaggactgcaaagagggaagaagctctggtggggtgagggtggtgattcaggttctgtatcctgactgtggtagcagtttggggtgtttacatccaaaaatattcgtagaattatgcatcttaaatgggtggagtttactgtatgtaaattatacctcaatgtaagaaaaaataatgtgtaagaaaactttcaattctcttgccagcaaacgttattcaaattcctgagccctttacttcgcaaattctctgcacttctgccccgtaccattaggtgacagcactagctccacaaattggataaatgcatttctggaaaagactagggacaaaatccaggcatcacttgtgctttcatatcaaccatgctgtacagcttgtgttgctgtctgcagctgcaatggggactcttgatttctttaaggaaacttgggttaccagagtatttccacaaatgctattcaaattagtgcttatgatatgcaagacactgtgctaggagccagaaaacaaagaggaggagaaatcagtcattatgtgggaacaacatagcaagatatttagatcattttgactagttaaaaaagcagcagagtacaaaatcacacatgcaatcagtataatccaaatcatgtaaatatgtgcctgtagaaagactagaggaataaacacaagaatcttaacagtcattgtcattagacactaagtctaattattattattagacactatgatatttgagatttaaaaaatctttaatattttaaaatttagagctcttctatttttccatagtattcaagtttgacaatgatcaagtattactctttctttttttttttttttttttttttttgagatggagttttggtcttgttgcccatgctggagtggaatggcatgaccatagctcactgcaacctccacctcctgggttcaagcaaagctgtcgcctcagcctcccgggtagatgggattacaggcgcccaccaccacactcggctaatgtttgtatttttagtagagatggggtttcaccatgttggccaggctggtctcaaactcctgacctcagaggatccacctgcctcagcctcccaaagtgctgggattacagatgtaggccactgcgcccggccaagtattgctcttatacattaaaaaacaggtgtgagccactgcgcccagccaggtattgctcttatacattaaaaaataggccggtgcagtggctcacgcctgtaatcccagcactttgggaagccaaggcgggcagaacacccgaggtcaggagtccaaggccagcctggccaagatggtgaaaccccgtctctattaaaaatacaaacattacctgggcatgatggtgggcgcctgtaatcccagctactcaggaggctgaggcaggaggatccgcggagcctggcagatctgcctgagcctgggaggttgaggctacagtaagccaagatcatgccagtatacttcagcctgggcgacaaagtgagaccgtaacaaaaaaaaaaaaatttaaaaaaagaaatttagatcaagatccaactgtaaaaagtggcctaaacaccacattaaagagtttggagtttattctgcaggcagaagagaaccatcagggggtcttcagcatgggaatggcatggtgcacctggtttttgtgagatcatggtggtgacagtgtggggaatgttattttggagggactggaggcagacagaccggttaaaaggccagcacaacagataaggaggaagaagatgagggcttggaccgaagcagagaagagcaaacagggaaggtacaaattcaagaaatattggggggtttgaatcaacacatttagatgattaattaaatatgaggactgaggaataagaaatgagtcaaggatggttccaggctgctaggctgcttacctgaggtggcaaagtcgggaggagtggcagtttaggacagggggcagttgaggaatattgttttgatcattttgagtttgaggtacaagttggacacttaggtaaagactggaggggaaatctgaatatacaattatgggactgaggaacaagtttattttattttttgtttcgttttcttgttgaagaacaaatttaattgtaatcccaagtcatcagcatctagaagacagtggcaggaggtgactgtcttgtgggtaagggtttggggtccttgatgagtatctctcaattggccttaaatataagcaggaaaaggagtttatgatggattccaggctcagcagggctcaggagggctcaggcagccagcagaggaagtcagagcatcttctttggtttagcccaagtaatgacttccttaaaaagctgaaggaaaatccagagtgaccagattataaactgtactcttgcattttctctccctcctctcacccacagcctcttgatgaaccggaggaagtttctttaccaattcaaaaatgtccgctgggctaagggtcggcgtgagacctacctgtgctacgtagtgaagaggcgtgacagtgctacatccttttcactggactttggttatcttcgcaataaggtatcaattaaagtcggctttgcaagcagtttaatggtcaactgtgagtgcttttagagccacctgctgatggtattacttccatccttttttggcatttgtgtctctatcacattcctcaaatccttttttttatttctttttccatgtccatgcacccatattagacatggcccaaaatatgtgatttaattcctccccagtaatgctgggcaccctaataccactccttccttcagtgccaagaacaactgctcccaaactgtttaccagctttcctcagcatctgaattgcctttgagattaattaagctaaaagcatttttatatgggagaatattatcagcttgtccaagcaaaaattttaaatgtgaaaaacaaattgtgtcttaagcatttttgaaaattaaggaagaagaatttgggaaaaaattaacggtggctcaattctgtcttccaaatgatttcttttccctcctactcacatgggtcgtaggccagtgaatacattcaacatggtgatccccagaaaactcagagaagcctcggctgatgattaattaaattgatctttcggctacccgagagaattacatttccaagagacttcttcaccaaaatccagatgggtttacataaacttctgcccacgggtatctcctctctcctaacacgctgtgacgtctgggcttggtggaatctcagggaagcatccgtggggtggaaggtcatcgtctggctcgttgtttgatggttatattaccatgcaattttctttgcctacatttgtattgaatacatcccaatctccttcctattcggtgacatgacacattctatttcagaaggctttgattttatcaagcactttcatttacttctcatggcagtgcctattacttctcttacaatacccatctgtctgctttaccaaaatctatttccccttttcagatcctcccaaatggtcctcataaactgtcctgcctccacctagtggtccaggtatatttccacaatgttacatcaacaggcacttctagccattttccttctcaaaaggtgcaaaaagcaacttcataaacacaaattaaatcttcggtgaggtagtgtgatgctgcttcctcccaactcagcgcacttcgtcttcctcattccacaaaaacccatagccttccttcactctgcaggactagtgctgccaagggttcagctctacctactggtgtgctcttttgagcaagttgcttagcctctctgtaacacaaggacaatagctgcaagcatccccaaagatcattgcaggagacaatgactaaggctaccagagccgcaataaaagtcagtgaattttagcgtggtcctctctgtctctccagaacggctgccacgtggaattgctcttcctccgctacatctcggactgggacctagaccctggccgctgctaccgcgtcacctggttcacctcctggagcccctgctacgactgtgcccgacatgtggccgactttctgcgagggaaccccaacctcagtctgaggatcttcaccgcgcgcctctacttctgtgaggaccgcaaggctgagcccgaggggctgcggcggctgcaccgcgccggggtgcaaatagccatcatgaccttcaaaggtgcgaaagggccttccgcgcaggcgcagtgcagcagcccgcattcgggattgcgatgcggaatgaatgagttagtggggaagctcgaggggaagaagtgggcggggattctggttcacctctggagccgaaattaaagattagaagcagagaaaagagtgaatggctcagagacaaggccccgaggaaatgagaaaatggggccagggttgcttctttcccctcgatttggaacctgaactgtcttctacccccatatccccgcctttttttcctttttttttttttgaagattatttttactgctggaatacttttgtagaaaaccacgaaagaactttcaaagcctgggaagggctgcatgaaaattcagttcgtctctccagacagcttcggcgcatccttttggtaaggggcttcctcgctttttaaattttctttctttctctacagtcttttttggagtttcgtatatttcttatattttcttattgttcaatcactctcagttttcatctgatgaaaactttatttctcctccacatcagctttttcttctgctgtttcaccattcagagccctctgctaaggttccttttccctcccttttctttcttttgttgtttcacatctttaaatttctgtctctccccagggttgcgtttccttcctggtcagaattcttttctcctttttttttttttttttttttttttttaaacaaacaaacaaaaaacccaaaaaaactctttcccaatttactttcttccaacatgttacaaagccatccactcagtttagaagactctccggccccaccgacccccaacctcgttttgaagccattcactcaatttgcttctctctttctctacagcccctgtatgaggttgatgacttacgagacgcatttcgtactttgggactttgatagcaacttccaggaatgtcacacacgatgaaatatctctgctgaagacagtggataaaaaacagtccttcaagtcttctctgtttttattcttcaactctcactttcttagagtttacagaaaaaatatttatatacgactctttaaaaagatctatgtcttgaaaatagagaaggaacacaggtctggccagggacgtgctgcaattggtgcagttttgaatgcaacattgtcccctactgggaataacagaactgcaggacctgggagcatcctaaagtgtcaacgtttttctatgacttttaggtaggatgagagcagaaggtagatcctaaaaagcatggtgagaggatcaaatgtttttatatcaacatcctttattatttgattcatttgagttaacagtggtgttagtgatagatttttctattcttttcccttgacgtttactttcaagtaacacaaactcttccatcaggccatgatctataggacctcctaatgagagtatctgggtgattgtgaccccaaaccatctctccaaagcattaatatccaatcatgcgctgtatgttttaatcagcagaagcatgtttttatgtttgtacaaaagaagattgttatgggtggggatggaggtatagaccatgcatggtcaccttcaagctactttaataaaggatcttaaaatgggcaggaggactgtgaacaagacaccctaataatgggttgatgtctgaagtagcaaatcttctggaaacgcaaactcttttaaggaagtccctaatttagaaacacccacaaacttcacatatcataattagcaaacaattggaaggaagttgcttgaatgttggggagaggaaaatctattggctctcgtgggtctcttcatctcagaaatgccaatcaggtcaaggtttgctacattttgtatgtgtgtgatgcttctcccaaaggtatattaactatataagagagttgtgacaaaacagaatgataaagctgcgaaccgtggcacacgctcatagttctagctgcttgggaggttgaggagggaggatggcttgaacacaggtgttcaaggccagcctgggcaacataacaagatcctgtctctcaaaaaaaaaaaaaaaaaaaagaaagagagagggccgggcgtggtggctcacgcctgtaatcccagcactttgggaggccgagccgggcggatcacctgtggtcaggagtttgagaccagcctggccaacatggcaaaaccccgtctgtactcaaaatgcaaaaattagccaggcgtggtagcaggcacctgtaatcccagctacttgggaggctgaggcaggagaatcgcttgaacccaggaggtggaggttgcagtaagctgagatcgtgccgttgcactccagcctgggcgacaagagcaagactctgtctcagaaaaaaaaaaaaaaaagagagagagagagaaagagaacaatatttgggagagaaggatggggaagcattgcaaggaaattgtgctttatccaacaaaatgtaaggagccaataagggatccctatttgtctcttttggtgtctatttgtccctaacaactgtctttgacagtgagaaaaatattcagaataaccatatccctgtgccgttattacctagcaacccttgcaatgaagatgagcagatccacaggaaaacttgaatgcacaactgtcttattttaatcttattgtacataagtttgtaaaagagttaaaaattgttacttcatgtattcatttatattttatattattttgcgtctaatgattttttattaacatgatttccttttctgatatattgaaatggagtctcaaagcttcataaatttataactttagaaatgattctaataacaacgtatgtaattgtaacattgcagtaatggtgctacgaagccatttctcttgatttttagtaaacttttatgacagcaaatttgcttctggctcactttcaatcagttaaataaatgataaataattttggaagctgtgaagataaaataccaaataaaataatataaaagtgatttatatgaagttaaaataaaaaatcagtatgatggaataaacttg

SEQ ID NO: 16 - protein, 198 aa, Homo sapiens [sequence omitted]

SEQ ID NO: 17 - protein, 198 aa, Canis lupus
  REGION 1..198: note = MISC_FEATURE - Canine AID (clAID) polypeptide sequence
  REGION 1..30: note = MISC_FEATURE - Nuclear localization sequence
  REGION 183..198: note = MISC_FEATURE - Nuclear export signal
MDSLLMKQRKFLYHFKNVRWAKGRHETYLCYVVKRRDSATSFSLDFGHLRNKSGCHVELLFLRYISDWDLDPGRCYRVTWFTSWSPCYDCARHVADFLRGYPNLSLRIFAARLYFCEDRKAEPEGLRRLHRAGVQIAIMTFKDYFYCWNTFVENREKTFKAWEGLHENSVRLSRQLRRILLPLYEVDDLRDAFRTLGL

SEQ ID NO: 18 - protein, 199 aa, Bos taurus
  REGION 1..199: note = MISC_FEATURE - Bovine AID (btAID) polypeptide sequence
  REGION 1..30: note = MISC_FEATURE - Nuclear localization sequence
  REGION 183..199: note = MISC_FEATURE - Nuclear export signal
MDSLLKKQRQFLYQFKNVRWAKGRHETYLCYVVKRRDSPTSFSLDFGHLRNKAGCHVELLFLRYISDWDLDPGRCYRVTWFTSWSPCYDCARHVADFLRGYPNLSLRIFTARLYFCDKERKAEPEGLRRLHRAGVQIAIMTFKDYFYCWNTFVENHERTFKAWEGLHENSVRLSRQLRRILLPLYEVDDLRDAFRTLGL

SEQ ID NO: 19 - protein, 239 aa, Rattus sp.
  REGION 1..239: note = MISC_FEATURE - Rat AID polypeptide sequence
  REGION 1..26: note = MISC_FEATURE - Nuclear localization sequence
  REGION 194..239: note = MISC_FEATURE - Nuclear export signal
MAVGSKPKAALVGPHWERERIWCFLCSTGLGTQQTGQTSRWLRPAATQDPVSPPRSLLMKQRKFLYHFKNVRWAKGRHETYLCYVVKRRDSATSFSLDFGYLRNKSGCHVELLFLRYISDWDLDPGRCYRVTWFTSWSPCYDCARHVADFLRGNPNLSLRIFTARLTGWGALPAGLMSPARPSDYFYCWNTFVENHERTFKAWEGLHENSVRLSRRLRRILLPLYEVDDLRDAFRTLGL

SEQ ID NO: 20 - protein, 198 aa, Mus musculus [sequence omitted]

SEQ ID NO: 21 - protein, 229 aa, Rattus norvegicus [sequence omitted]

SEQ ID NO: 22 - protein, 229 aa, Mesocricetus auratus
  REGION 1..229: note = MISC_FEATURE - maAPOBEC-1 polypeptide sequence
MSSETGPVVVDPTLRRRIEPHEFDAFFDQGELRKETCLLYEIRWGGRHNIWRHTGQNTSRHVEINFIEKFTSERYFYPSTRCSIVWFLSWSPCGECSKAITEFLSGHPNVTLFIYAARLYHHTDQRNRQGLRDLISRGVTIRIMTEQEYCYCWRNFVNYPPSNEVYWPRYPNLWMRLYALELYCIHLGLPPCLKIKRRHQYPLTFFRLNLQSCHYQRIPPHILWATGFI

SEQ ID NO: 23 - protein, 236 aa, Pongo pygmaeus
  REGION 1..236: note = MISC_FEATURE - ppAPOBEC-1 polypeptide sequence
MTSEKGPSTGDPTLRRRIESWEFDVFYDPRELRKETCLLYEIKWGMSRKIWRSSGKNTTNHVEVNFIKKFTSERRFHSSISCSITWFLSWSPCWECSQAIREFLSQHPGVTLVIYVARLFWHMDQRNRQGLRDLVNSGVTIQIMRASEYYHCWRNFVNYPPGDEAHWPQYPPLWMMLYALELHCIILSLPPCLKISRRWQNHLAFFRLHLQNCHYQTIPPHILLATGLIHPSVTWR

SEQ ID NO: 24 - protein, 236 aa, Oryctolagus cuniculus
  REGION 1..236: note = MISC_FEATURE - ocAPOBEC1 polypeptide sequence
MASEKGPSNKDYTLRRRIEPWEFEVFFDPQELRKEACLLYEIKWGASSKTWRSSGKNTTNHVEVNFLEKLTSEGRLGPSTCCSITWFLSWSPCWECSMAIREFLSQHPGVTLIIFVARLFQHMDRRNRQGLKDLVTSGVTVRVMSVSEYCYCWENFVNYPPGKAAQWPRYPPRWMLMYALELYCIILGLPPCLKISRRHQKQLTFFSLTPQYCHYKMIPPYILLATGLLQPSVPWR

SEQ ID NO: 25 - protein, 235 aa, Monodelphis domestica
  REGION 1..235: note = MISC_FEATURE - mdAPOBEC-1 polypeptide sequence
MNSKTGPSVGDATLRRRIKPWEFVAFFNPQELRKETCLLYEIKWGNQNIWRHSNQNTSQHAEINFMEKFTAERHFNSSVRCSITWFLSWSPCWECSKAIRKFLDHYPNVTLAIFISRLYWHMDQQHRQGLKELVHSGVTIQIMSYSEYHYCWRNFVDYPQGEEDYWPKYPYLWIMLYVLELHCIILGLPPCLKISGSHSNQLALFSLDLQDCHYQKIPYNVLVATGLVQPFVTWR

SEQ ID NO: 26 - protein, 224 aa, Pongo pygmaeus
  REGION 1..224: note = MISC_FEATURE - ppAPOBEC-2 polypeptide sequence
MAQKEEAAAATEAASQNGEDLENLDDPEKLKELIELPPFEIVTGERLPANFFKFQFRNVEYSSGRNKTFLCYVVEAQGKGGQVQASRGYLEDEHAAAHAEEAFFNTILPAFDPALRYNVTWYVSSSPCAACADRIIKTLSKTKNLRLLILVGRLFMWEELEIQDALKKLKEAGCKLRIMKPQDFEYVWQNFVEQEEGESKAFQPWEDIQENFLYYEEKLADILK

SEQ ID NO: 27 - protein, 224 aa, Bos taurus
  REGION 1..224: note = MISC_FEATURE - btAPOBEC-2 polypeptide sequence
MAQKEEAAAAAEPASQNGEEVENLEDPEKLKELIELPPFEIVTGERLPAHYFKFQFRNVEYSSGRNKTFLCYVVEAQSKGGQVQASRGYLEDEHATNHAEEAFFNSIMPTFDPALRYMVTWYVSSSPCAACADRIVKTLNKTKNLRLLILVGRLFMWEEPEIQAALRKLKEAGCRLRIMKPQDFEYIWQNFVEQEEGESKAFEPWEDIQENFLYYEEKLADILK

SEQ ID NO: 28 - protein, 440 aa, Mus musculus
  REGION 1..440: note = MISC_FEATURE - mAPOBEC-3-(1) polypeptide sequence
MQPQRLGPRAGMGPFCLGCSHRKCYSPIRNLISQETFKFHFKNLGYAKGRKDTFLCYEVTRKDCDSPVSLHHGVFKNKDNIHAEICFLYWFHDKVLKVLSPREEFKITWYMSWSPCFECAEQIVRFLATHHNLSLDIFSSRLYNVQDPETQQNLCRLVQEGAQVAAMDLYEFKKCWKKFVDNGGRRFRPWKRLLTNFRYQDSKLQEILRPCYISVPSSSSSTLSNICLTKGLPETRFWVEGRRMDPLSEEEFYSQFYNQRVKHLCYYHRMKPYLCYQLEQFNGQAPLKGCLLSEKGKQHAEILFLDKIRSMELSQVTITCYLTWSPCPNCAWQLAAFKRDRPDLILHIYTSRLYFHWKRPFQKGLCSLWQSGILVDVMDLPQFTDCWTNFVNPKRPFWPWKGLEIISRRTQRRLRRIKESWGLQDLVNDFGNLQLGPPMS

SEQ ID NO: 29 - protein, 429 aa, Mus musculus
  REGION 1..429: note = MISC_FEATURE - APOBEC-3-(2) (Mouse APOBEC-3) polypeptide sequence
  REGION 71..108: note = MISC_FEATURE - Nucleic acid editing domain
  REGION 288..319: note = MISC_FEATURE - Nucleic acid editing domain
MGPFCLGCSHRKCYSPIRNLISQETFKFHFKNLGYAKGRKDTFLCYEVTRKDCDSPVSLHHGVFKNKDNIHAEICFLYWFHDKVLKVLSPREEFKITWYMSWSPCFECAEQIVRFLATHHNLSLDIFSSRLYNVQDPETQQNLCRLVQEGAQVAAMDLYEFKKCWKKFVDNGGRRFRPWKRLLTNFRYQDSKLQEILRPCYIPVPSSSSSTLSNICLTKGLPETRFCVEGRRMDPLSEEEFYSQFYNQRVKHLCYYHRMKPYLCYQLEQFNGQAPLKGCLLSEKGKQHAEILFLDKIRSMELSQVTITCYLTWSPCPNCAWQLAAFKRDRPDLILHIYTSRLYFHWKRPFQKGLCSLWQSGILVDVMDLPQFTDCWTNFVNPKRPFWPWKGLEIISRRTQRRLRRIKESWGLQDLVNDFGNLQLGPPMS

SEQ ID NO: 30 - protein, 430 aa, Rattus sp.
  REGION 1..430: note = MISC_FEATURE - APOBEC-3 polypeptide sequence
  REGION 72..109: note = MISC_FEATURE - Nucleic acid editing domain
  REGION 289..320: note = MISC_FEATURE - Nucleic acid editing domain
MGPFCLGCSHRKCYSPIRNLISQETFKFHFKNRLRYAIDRKDTFLCYEVTRKDCDSPVSLHHGVFKNKDNIHAEICFLYWFHDKVLKVLSPREEFKITWYMSWSPCFECAEQVLRFLATHHNLSLDIFSSRLYNIRDPENQQNLCRLVQEGAQVAAMDLYEFKKCWKKFVDNGGRRFRPWKKLLTNFRYQDSKLQEILRPCYIPVPSSSSSTLSNICLTKGLPETRFCVERRRVHLLSEEEFYSQFYNQRVKHLCYYHGVKPYLCYQLEQFNGQAPLKGCLLSEKGKQHAEILFLDKIRSMELSQVIITCYLTWSPCPNCAWQLAAFKRDRPDLILHIYTSRLYFHWKRPFQKGLCSLWQSGILVDVMDLPQFTDCWTNFVNPKRPFWPWKGLEIISRRTQRRLHRIKESWGLQDLVNDFGNLQLGPPMS

SEQ ID NO: 31 - protein, 199 aa, Homo sapiens
  REGION 1..199: note = MISC_FEATURE - hAPOBEC-3A polypeptide sequence
  REGION 70..106: note = MISC_FEATURE - Nucleic acid editing domain
MEASPASGPRHLMDPHIFTSNFNNGIGRHKTYLCYEVERLDNGTSVKMDQHRGFLHNQAKNLLCGFYGRHAELRFLDLVPSLQLDPAQIYRVTWFISWSPCFSWGCAGEVRAFLQENTHVRLRIFAARIYDYDPLYKEALQMLRDAGAQVSIMTYDEFKHCWDTFVDHQGCPFQPWDGLDEHSQALSGRLRAILQNQGN

SEQ ID NO: 32 - protein, 373 aa, Homo sapiens
  REGION 1..373: note = MISC_FEATURE - hAPOBEC-3F polypeptide sequence
  REGION 65..99: note = MISC_FEATURE - Nucleic acid editing domain
  REGION 248..283: note = MISC_FEATURE - Nucleic acid editing domain
MKPHFRNTVERMYRDTFSYNFYNRPILSRRNTVWLCYEVKTKGPSRPRLDAKIFRGQVYSQPEHHAEMCFLSWFCGNQLPAYKCFQITWFVSWTPCPDCVAKLAEFLAEHPNVTLTISAARLYYYWERDYRRALCRLSQAGARVKIMDDEEFAYCWENFVYSEGQPFMPWYKFDDNYAFLHRTLKEILRNPMEAMYPHIFYFHFKNLRKAYGRNESWLCFTMEVVKHHSPVSWKRGVFRNQVDPETHCHAERCFLSWFCDDILSPNTNYEVTWYTSWSPCPECAGEVAEFLARHSNVNLTIFTARLYYFWDTDYQEGLRSLSQEGASVEIMGYKDFKYCWENFVYNDDEPFKPWKGLKYNFLFLDSKLQEILE

SEQ ID NO: 33 - protein, 370 aa, Macaca mulatta
  REGION 1..370: note = MISC_FEATURE - Rhesus macaque APOBEC-3G polypeptide sequence
  REGION 1..61: note = MISC_FEATURE - Cytoplasmic localization signal
MVEPMDPRTFVSNFNNRPILSGLNTVWLCCEVKTKDPSGPPLDAKIFQGKVYSKAKYHPEMRFLRWFHKWRQLHHDQEYKVTWYVSWSPCTRCANSVATFLAKDPKVTLTIFVARLYYFWKPDYQQALRILCQKRGGPHATMKIMNYNEFQDCWNKFVDGRGKPFKPRNNLPKHYTLLQATLGELLRHLMDPGTFTSNFNNKPWVSGQHETYLCYKVERLHNDTWVPLNQHRGFLRNQAPNIHGFPKGRHAELCFLDLIPFWKLDGQQYRVTCFTSWSPCFSCAQEMAKFISNNEHVSLCIFAARIYDDQGRYQEGLRALHRDGAKIAMMNYSEFEYCWDTFVDRQGRPFQPWDGLDEHSQALSGRLRAI

SEQ ID NO: 34 - protein, 384 aa, Pan troglodytes
  REGION 1..384: note = MISC_FEATURE - Chimpanzee APOBEC-3G polypeptide sequence
  REGION 1..60: note = MISC_FEATURE - Cytoplasmic localization signal
  REGION 65..100: note = MISC_FEATURE - Nucleic acid editing domain
  REGION 257..291: note = MISC_FEATURE - Nucleic acid editing domain
MKPHFRNPVERMYQDTFSDNFYNRPILSHRNTVWLCYEVKTKGPSRPPLDAKIFRGQVYSKLKYHPEMRFFHWFSKWRKLHRDQEYEVTWYISWSPCTKCTRDVATFLAEDPKVTLTIFVARLYYFWDPDYQEALRSLCQKRDGPRATMKIMNYDEFQHCWSKFVYSQRELFEPWNNLPKYYILLHIMLGEILRHSMDPPTFTSNFNNELWVRGRHETYLCYEVERLHNDTWVLLNQRRGFLCNQAPHKHGFLEGRHAELCFLDVIPFWKLDLHQDYRVTCFTSWSPCFSCAQEMAKFISNNKHVSLCIFAARIYDDQGRCQEGLRTLAKAGAKISIMTYSEFKHCWDTFVDHQGCPFQPWDGLEEHSQALSGRLRAILQNQGN

SEQ ID NO: 35 - protein, 377 aa, Chlorocebus sabaeus
  REGION 1..377: note = MISC_FEATURE - Green monkey APOBEC-3G polypeptide sequence
  REGION 1..60: note = MISC_FEATURE - Cytoplasmic localization signal
  REGION 65..100: note = MISC_FEATURE - Nucleic acid editing domain
  REGION 257..290: note = MISC_FEATURE - Nucleic acid editing domain
MNPQIRNMVEQMEPDIFVYYFNNRPILSGRNTVWLCYEVKTKDPSGPPLDANIFQGKLYPEAKDHPEMKFLHWFRKWRQLHRDQEYEVTWYVSWSPCTRCANSVATFLAEDPKVTLTIFVARLYYFWKPDYQQALRILCQERGGPHATMKIMNYNEFQHCWNEFVDGQGKPFKPRKNLPKHYTLLHATLGELLRHVMDPGTFTSNFNNKPWVSGQRETYLCYKVERSHNDTWVLLNQHRGFLRNQAPDRHGFPKGRHAELCFLDLIPFWKLDDQQYRVTCFTSWSPCFSCAQKMAKFISNNKHVSLCIFAARIYDDQGRCQEGLRTLHRDGAKIAVMNYSEFEYCWDTFVDRQGRPFQPWDGLDEHSQALSGRLRAI

SEQ ID NO: 36 - protein, 384 aa, Homo sapiens
  REGION 1..384: note = MISC_FEATURE - Human APOBEC-3G polypeptide sequence
  REGION 1..60: note = MISC_FEATURE - Cytoplasmic localization signal
  REGION 65..100: note = MISC_FEATURE - Nucleic acid editing domain
  REGION 257..291: note = MISC_FEATURE - Nucleic acid editing domain
MKPHFRNTVERMYRDTFSYNFYNRPILSRRNTVWLCYEVKTKGPSRPPLDAKIFRGQVYSELKYHPEMRFFHWFSKWRKLHRDQEYEVTWYISWSPCTKCTRDMATFLAEDPKVTLTIFVARLYYFWDPDYQEALRSLCQKRDGPRATMKIMNYDEFQHCWSKFVYSQRELFEPWNNLPKYYILLHIMLGEILRHSMDPPTFTFNFNNEPWVRGRHETYLCYEVERMHNDTWVLLNQRRGFLCNQAPHKHGFLEGRHAELCFLDVIPFWKLDLDQDYRVTCFTSWSPCFSCAQEMAKFISKNKHVSLCIFTARIYDDQGRCQEGLRTLAEAGAKISIMTYSEFKHCWDTFVDHQGCPFQPWDGLDEHSQDLSGRLRAILQNQEN

SEQ ID NO: 37 - protein, 382 aa, Homo sapiens
  REGION 1..382: note = MISC_FEATURE - Human APOBEC-3B polypeptide sequence
  REGION 66..100: note = MISC_FEATURE - Nucleic acid editing domain
  REGION 251..289: note = MISC_FEATURE - Nucleic acid editing domain
MNPQIRNPMERMYRDTFYDNFENEPILYGRSYTWLCYEVKIKRGRSNLLWDTGVFRGQVYFKPQYHAEMCFLSWFCGNQLPAYKCFQITWFVSWTPCPDCVAKLAEFLSEHPNVTLTISAARLYYYWERDYRRALCRLSQAGARVTIMDYEEFAYCWENFVYNEGQQFMPWYKFDENYAFLHRTLKEILRYLMDPDTFTFNFNNDPLVLRRRQTYLCYEVERLDNGTWVLMDQHMGFLCNEAKNLLCGFYGRHAELRFLDLVPSLQLDPAQIYRVTWFISWSPCFSWGCAGEVRAFLQENTHVRLRIFAARIYDYDPLYKEALQMLRDAGAQVSIMTYDEFEYCWDTFVYRQGCPFQPWDGLEEHSQALSGRLRAILQNQGN

SEQ ID NO: 38 - protein, 395 aa, Rattus sp.
  REGION 1..395: note = MISC_FEATURE - Rat APOBEC-3B polypeptide sequence
MQPQGLGPNAGMGPVCLGCSHRRPYSPIRNPLKKLYQQTFYFHFKNVRYAWGRKNNFLCYEVNGMDCALPVPLRQGVFRKQGHIHAELCFIYWFHDKVLRVLSPMEEFKVTWYMSWSPCSKCAEQVARFLAAHRNLSLAIFSSRLYYYLRNPNYQQKLCRLIQEGVHVAAMDLPEFKKCWNKFVDNDGQPFRPWMRLRINFSFYDCKLQEIFSRMNLLREDVFYLQFNNSHRVKPVQNRYYRRKSYLCYQLERANGQEPLKGYLLYKKGEQHVEILFLEKMRSMELSQVRITCYLTWSPCPNCARQLAAFKKDHPDLILRIYTSRLYFWRKKFQKGLCTLWRSGIHVDVMDLPQFADCWTNFVNPQRPFRPWNELEKNSWRIQRRLRRIKESWGL

SEQ ID NO: 39 - protein, 226 aa, Bos taurus
  REGION 1..226: note = MISC_FEATURE - Bovine APOBEC-3B polypeptide sequence
DGWEVAFRSGTVLKAGVLGVSMTEGWAGSGHPGQGACVWTPGTRNTMNLLREVLFKQQFGNQPRVPAPYYRRKTYLCYQLKQRNDLTLDRGCFRNKKQRHAERFIDKINSLDLNPSQSYKIICYITWSPCPNCANELVNFITRNNHLKLEIFASRLYFHWIKSFKMGLQDLQNAGISVAVMTHTEFEDCWEQFVDNQSRPFQPWDKLEQYSASIRRRLQRILTAPI

SEQ ID NO: 40 - protein, 490 aa, Pan troglodytes
  REGION 1..490: note = MISC_FEATURE - Chimpanzee APOBEC-3B polypeptide sequence
MNPQIRNPMEWMYQRTFYYNFENEPILYGRSYTWLCYEVKIRRGHSNLLWDTGVFRGQMYSQPEHHAEMCFLSWFCGNQLSAYKCFQITWFVSWTPCPDCVAKLAKFLAEHPNVTLTISAARLYYYWERDYRRALCRLSQAGARVKIMDDEEFAYCWENFVYNEGQPFMPWYKFDDNYAFLHRTLKEIIRHLMDPDTFTFNFNNDPLVLRRHQTYLCYEVERLDNGTWVLMDQHMGFLCNEAKNLLCGFYGRHAELRFLDLVPSLQLDPAQIYRVTWFISWSPCFSWGCAGQVRAFLQENTHVRLRIFAARIYDYDPLYKEALQMLRDAGAQVSIMTYDEFEYCWDTFVYRQGCPFQPWDGLEEHSQALSGRLRAILQVRASSLCMVPHRPPPPPQSPGPCLPLCSEPPLGSLLPTGRPAPSLPFLLTASFSFPPPASLPPLPSLSLSPGHLPVPSFHSLTSCSIQPPCSSRIRETEGWASVSKEGRDLG

SEQ ID NO: 41 - protein, 190 aa, Homo sapiens
  REGION 1..190: note = MISC_FEATURE - Human APOBEC-3C polypeptide sequence
  REGION 65..100: note = MISC_FEATURE - Nucleic acid editing domain
MNPQIRNPMKAMYPGTFYFQFKNLWEANDRNETWLCFTVEGIKRRSVVSWKTGVFRNQVDSETHCHAERCFLSWFCDDILSPNTKYQVTWYTSWSPCPDCAGEVAEFLARHSNVNLTIFTARLYYFQYPCYQEGLRSLSQEGVAVEIMDYEDFKYCWENFVYNDNEPFKPWKGLKTNFRLLKRRLRESLQ

SEQ ID NO: 42 - protein, 190 aa, Gorilla sp.
  REGION 1..190: note = MISC_FEATURE - Gorilla APOBEC-3C polypeptide sequence
  REGION 65..100: note = MISC_FEATURE - Nucleic acid editing domain
MNPQIRNPMKAMYPGTFYFQFKNLWEANDRNETWLCFTVEGIKRRSVVSWKTGVFRNQVDSETHCHAERCFLSWECDDILSPNTNYQVTWYTSWSPCPECAGEVAEFLARHSNVNLTIFTARLYYFQDTDYQEGLRSLSQEGVAVKIMDYKDFKYCWENFVYNDDEPFKPWKGLKYNFRFLKRRLQEILE

SEQ ID NO: 43 - protein, 202 aa, Macaca mulatta
  REGION 1..202: note = MISC_FEATURE - Rhesus macaque APOBEC-3A polypeptide sequence
  REGION 72..103: note = MISC_FEATURE - Nucleic acid editing domain
MDGSPASRPRHLMDPNTFTFNFNNDLSVRGRHQTYLCYEVERLDNGTWVPMDERRGFLCNKAKNVPCGDYGCHVELRFLCEVPSWQLDPAQTYRVTWFISWSPCFRRGCAGQVRVFLQENKHVRLRIFAARIYDYDPLYQEALRTLRDAGAQVSIMTYEEFKHCWDTFVDRQGRPFQPWDGLDEHSQALSGRLRAILQNQGN

SEQ ID NO: 44 - protein, 185 aa, Bos taurus
  REGION 1..185: note = MISC_FEATURE - Bovine APOBEC-3A polypeptide sequence
  REGION 56..86: note = MISC_FEATURE - Nucleic acid editing domain
MDEYTFTENFNNQGWPSKTYLCYEMERLDGDATIPLDEYKGFVRNKGLDQPEKPCHAELYFLGKIHSWNLDRNQHYRLTCFISWSPCYDCAQKLTTFLKENHHISLHILASRIYTHNRFGCHQSGLCELQAAGARITIMTFEDFKHCWETFVDHKGKPFQPWEGLNVKSQALCTELQAILKTQQN

SEQ ID NO: 45 - protein, 200 aa, Homo sapiens
  REGION 1..200: note = MISC_FEATURE - Human APOBEC-3H polypeptide sequence
  REGION 54..88: note = MISC_FEATURE - Nucleic acid editing domain
MALLTAETFRLQFNNKRRLRRPYYPRKALLCYQLTPQNGSTPTRGYFENKKKCHAEICFINEIKSMGLDETQCYQVTCYLTWSPCSSCAWELVDFIKAHDHLNLGIFASRLYYHWCKPQQKGLRLLCGSQVPVEVMGFPKFADCWENFVDHEKPLSFNPYKMLEELDKNSRAIKRRLERIKIPGVRAQGRYMDILCDAEV

SEQ ID NO: 46 - protein, 210 aa, Macaca mulatta
  REGION 1..210: note = MISC_FEATURE - Rhesus macaque APOBEC-3H polypeptide sequence
MALLTAKTFSLQFNNKRRVNKPYYPRKALLCYQLTPQNGSTPTRGHLKNKKKDHAEIRFINKIKSMGLDETQCYQVTCYLTWSPCPSCAGELVDFIKAHRHLNLRIFASRLYYHWRPNYQEGLLLLCGSQVPVEVMGLPEFTDCWENFVDHKEPPSFNPSEKLEELDKNSQAIKRRLERIKSRSVDVLENGLRSLQLGPVTPSSSIRNSR

SEQ ID NO: 47 - protein, 386 aa, Homo sapiens
  REGION 1..386: note = MISC_FEATURE - Human APOBEC-3D polypeptide sequence
  REGION 78..109: note = MISC_FEATURE - Nucleic acid editing domain
  REGION 262..296: note = MISC_FEATURE - Nucleic acid editing domain
MNPQIRNPMERMYRDTFYDNFENEPILYGRSYTWLCYEVKIKRGRSNLLWDTGVFRGPVLPKRQSNHRQEVYFRFENHAEMCFLSWFCGNRLPANRRFQITWFVSWNPCLPCVVKVTKFLAEHPNVTLTISAARLYYYRDRDWRWVLLRLHKAGARVKIMDYEDFAYCWENFVCNEGQPFMPWYKFDDNYASLHRTLKEILRNPMEAMYPHIFYFHFKNLLKACGRNESWLCFTMEVTKHHSAVFRKRGVFRNQVDPETHCHAERCFLSWFCDDILSPNTNYEVTWYTSWSPCPECAGEVAEFLARHSNVNLTIFTARLCYFWDTDYQEGLCSLSQEGASVKIMGYKDFVSCWKNFVYSDDEPFKPWKGLQTNFRLLKRRLREILQ

SEQ ID NO: 48 - protein, 236 aa, Homo sapiens
  REGION 1..236: note = MISC_FEATURE - Human APOBEC-1 polypeptide sequence
MTSEKGPSTGDPTLRRRIEPWEFDVFYDPRELRKEACLLYEIKWGMSRKIWRSSGKNTTNHVEVNFIKKFTSERDFHPSMSCSITWFLSWSPCWECSQAIREFLSRHPGVTLVIYVARLFWHMDQQNRQGLRDLVNSGVTIQIMRASEYYHCWRNFVNYPPGDEAHWPQYPPLWMMLYALELHCIILSLPPCLKISRRWQNHLTFFRLHLQNCHYQTIPPHILLATGLIHPSVAWR

SEQ ID NO: 49 - protein, 229 aa, Mus musculus
  REGION 1..229: note = MISC_FEATURE - Mouse APOBEC-1 polypeptide sequence
MSSETGPVAVDPTLRRRIEPHEFEVFFDPRELRKETCLLYEINWGGRHSVWRHTSQNTSNHVEVNFLEKFTTERYFRPNTRCSITWFLSWSPCGECSRAITEFLSRHPYVTLFIYIARLYHHTDQRNRQGLRDLISSGVTIQIMTEQEYCYCWRNFVNYPPSNEAYWPRYPHLWVKLYVLELYCIILGLPPCLKILRRKQPQLTFFTITLQTCHYQRIPPHLLWATGLK

SEQ ID NO: 50 - protein, 224 aa, Homo sapiens
  REGION 1..224: note = MISC_FEATURE - Human APOBEC-2 polypeptide sequence
MAQKEEAAVATEAASQNGEDLENLDDPEKLKELIELPPFEIVTGERLPANFFKFQFRNVEYSSGRNKTFLCYVVEAQGKGGQVQASRGYLEDEHAAAHAEEAFFNTILPAFDPALRYNVTWYVSSSPCAACADRIIKTLSKTKNLRLLILVGRLFMWEEPEIQAALKKLKEAGCKLRIMKPQDFEYVWQNFVEQEEGESKAFQPWEDIQENFLYYEEKLADILK

SEQ ID NO: 51 - protein, 224 aa, Mus musculus
  REGION 1..224: note = MISC_FEATURE - Mouse APOBEC-2 polypeptide sequence
MAQKEEAAEAAAPASQNGDDLENLEDPEKLKELIDLPPFEIVTGVRLPVNFFKFQFRNVEYSSGRNKTFLCYVVEVQSKGGQAQATQGYLEDEHAGAHAEEAFFNTILPAFDPALKYNVTWYVSSSPCAACADRILKTLSKTKNLRLLILVSRLFMWEEPEVQAALKKLKEAGCKLRIMKPQDFEYIWQNFVEQEEGESKAFEPWEDIQENFLYYEEKLADILK

SEQ ID NO: 52 - protein, 224 aa, Rattus sp.
  REGION 1..224: note = MISC_FEATURE - Rat APOBEC-2 polypeptide sequence
MAQKEEAAEAAAPASQNGDDLENLEDPEKLKELIDLPPFEIVTGVRLPVNFFKFQFRNVEYSSGRNKTFLCYVVEAQSKGGQVQATQGYLEDEHAGAHAEEAFFNTILPAFDPALKYNVTWYVSSSPCAACADRILKTLSKTKNLRLLILVSRLFMWEEPEVQAALKKLKEAGCKLRIMKPQDFEYLWQNFVEQEEGESKAFEPWEDIQENFLYYEEKLADILK

SEQ ID NO: 53 - protein, 208 aa, Petromyzon marinus
  REGION 1..208: note = MISC_FEATURE - Petromyzon marinus CDA1 (pmCDAl) polypeptide sequence
MTDAEYVRIHEKLDIYTFKKQFFNNKKSVSHRCYVLFELKRRGERRACFWGYAVNKPQSGTERGIHAEIFSIRKVEEYLRDNPGQFTINWYSSWSPCADCAEKILEWYNQELRGNGHTLKIWACKLYYEKNARNQIGLWNLRDNGVGLNVMVSEHYQCCRKIFIQSSHNQLNENRWLEKTLKRAEKRRSELSFMIQVKILHTTKSPAV

SEQ ID NO: 54 - protein, 381 aa, Homo sapiens
  REGION 1..381: note = MISC_FEATURE - Human APOBEC3G D316R D317R polypeptide sequence
MKPHFRNTVERMYRDTFSYNFYNRPILSRRNTVWLCYEVKTKGPSRPPLDAKIFRGQVYSELKYHPEMRFFHWFSKWRKLHRDQEYEVTWYISWSPCTKCTRDMATFLAEDPKVTLTIFVARLYYFWDPDYQEALRSLCQKRDGPRATMKFNYDEFQHCWSKFVYSQRELFEPWNNLPKYYILLHFMLGEILRHSMDPPTFTFNFNNEPWVRGRHETYLCYEVERMHNDTWVLLNQRRGFLCNQAPHKHGFLEGRHAELCFLDVIPFWKLDLDQDYRVTCFTSWSPCFSCAQEMAKFISKKHVSLCIFTARIYRRQGRCQEGLRTLAEAGAKISFTYSEFKHCWDTFVDHQGCPFQPWDGLDEHSQDLSGRLRAILQNQEN

SEQ ID NO: 55 - protein, 182 aa, Homo sapiens
  REGION 1..182: note = MISC_FEATURE - Human APOBEC3G chain A polypeptide sequence
MDPPTFTFNFNNEPWWGRHETYLCYEVERMHNDTWVLLNQRRGFLCNQAPHKHGFLEGRHAELCFLDVIPFWKLDLDQDYRVTCFTSWSPCFSCAQEMAKFISKNKHVSLCIFTARIYDDQGRCQEGLRTLAEAGAKISFTYSEFKHCWDTFVDHQGCPFQPWDGLDEHSQDLSGRLRAILQ

SEQ ID NO: 56 - protein, 184 aa, Homo sapiens
  REGION 1..184: note = MISC_FEATURE - Human APOBEC3G chain A D120R D121R polypeptide sequence
MDPPTFTFNFNNEPWVRGRHETYLCYEVERMHNDTWVLLNQRRGFLCNQAPHKHGFLEGRHAELCFLDVIPFWKLDLDQDYRVTCFTSWSPCFSCAQEMAKFISKNKHVSLCIFTARIYRRQGRCQEGLRTLAEAGAKISFMTYSEFKHCWDTFVDHQGCPFQPWDGLDEHSQDLSGRLRAILQ

SEQ ID NO: 57 - protein, 367 aa, Homo sapiens
  REGION 1..367: note = MISC_FEATURE - hAPOBEC-4 polypeptide sequence
MEPIYEEYLANHGTIVKPYYWLSFSLDCSNCPYHIRTGEEARVSLTEFCQIFGFPYGTTFPQTKHLTFYELKTSSGSLVQKGHASSCTGNYIHPESMLFEMNGYLDSAIYNNDSIRHIILYSNNSPCNEANHCCISKMYNFLITYPGITLSIYFSQLYHTEMDFPASAWNREALRSLASLWPRVVLSPISGGIWHSVLHSFISGVSGSHVFQPILTGRALADRHNAYEINAITGVKPYFTDVLLQTKRNPNTKAQEALESYPLNNAFPGQFFQMPSGQLQPNLPPDLRAPVVFVLVPLRDLPPMHMGQNPNKPRNIVRHLNMPQMSFQETKDLGRLPTGRSVEIVEITEQFASSKEADEKKKKKGKK

SEQ ID NO: 58 - protein, 388 aa, Rattus norvegicus
  REGION 1..388: note = MISC_FEATURE - rAPOBEC-4 polypeptide sequence
MEPLYEEYLTHSGTIVKPYYWLSVSLNCTNCPYHIRTGEEARVPYTEFHQTFGFPWSTYPQTKHLTFYELRSSSGNLIQKGLASNCTGSHTHPESMLFERDGYLDSLIFHDSNIRHIILYSNNSPCDEANHCCISKMYNFLMNYPEVTLSVFFSQLYHTENQFPTSAWNREALRGLASLWPQVTLSAISGGIWQSILETFVSGISEGLTAVRPFTAGRTLTDRYNAYEINCITEVKPYFTDALHSWQKENQDQKVWAASENQPLHNTTPAQWQPDMSQDCRTPAVFMLVPYRDLPPIHVNPSPQKPRTVVRHLNTLQLSASKVKALRKSPSGRPVKKEEARKGSTRSQEANETNKSKWKKQTLFIKSNICHLLEREQKKIGILSSWSV

SEQ ID NO: 59 - protein, 363 aa, Macaca fascicularis
  REGION 1..363: note = MISC_FEATURE - mfAPOBEC-4 polypeptide sequence
MEPTYEEYLANHGTIVKPYYWLSFSLDCSNCPYHIRTGEEARVSLTEFCQIFGFPYGTTYPQTKHLTFYELKTSSGSLVQKGHASSCTGNYIHPESMLFEMNGYLDSAIYNNDSIRHIILYCNNSPCNEANHCCISKVYNFLITYPGITLSIYFSQLYHTEMDFPASAWNREALRSLASLWPRVVLSPISGGIWHSVLHSFVSGVSGSHVFQPILTGRALTDRYNAYEINAITGVKPFFTDVLLHTKRNPNTKAQMALESYPLNNAFPGQSFQMTSGIPPDLRAPVVFVLLPLRDLPPMHMGQDPNKPRNIIRHLNMPQMSFQETKDLERLPTRRSVETVEITERFASSKQAEEKTKKKKGKK

SEQ ID NO: 60 - protein, 218 aa, Rattus norvegicus
  REGION 1..218: note = MISC_FEATURE - rAPOBEC-1 (delta 177-186) polypeptide sequence
MSSETGPVAVDPTLRRRIEPHEFEVFFDPRELRKETCLLYEINWGGRHSIWRHTSQNTNKHVEVNFIEKFTTERYFCPNTRCSITWFLSWSPCGECSRAITEFLSRYPHVTLFIYIARLYHHADPRNRQGLRDLISSGVTIQIMTEQESGYCWRNFVNYSPSNEAHWPRYPHLWVRGLPPCLNILRRKQPQLTFFTIALQSCHYQRLPPHILWATGLK

SEQ ID NO: 61 - protein, 218 aa, Rattus norvegicus
  REGION 1..218: note = MISC_FEATURE - rAPOBEC-1 (delta 202-213) polypeptide sequence
MSSETGPVAVDPTLRRRIEPHEFEVFFDPRELRKETCLLYEINWGGRHSIWRHTSQNTNKHVEVNFIEKFTTERYFCPNTRCSITWFLSWSPCGECSRAITEFLSRYPHVTLFIYIARLYHHADPRNRQGLRDLISSGVTIQIMTEQESGYCWRNFVNYSPSNEAHWPRYPHLWVRLYVLELYCIILGLPPCLNILRRKQPQHYQRLPPHILWATGLK

SEQ ID NO: 62 - protein, 198 aa, Mus musculus
  REGION 1..198: note = MISC_FEATURE - mouse cytidine deaminase polypeptide sequence
  REGION 1..30: note = MISC_FEATURE - Nuclear localization sequence
  REGION 183..198: note = MISC_FEATURE - Nuclear export signal
MDSLLMKQKKFLYHFKNVRWAKGRHETYLCYVVKRRDSATSCSLDFGHLRNKSGCHVELLFLRYISDWDLDPGRCYRVTWFTSWSPCYDCARHVAEFLRWNPNLSLRIFTARLYFCEDRKAEPEGLRRLHRAGVQIGIMTFKDYFYCWNTFVENRERTFKAWEGLHENSVRLTRQLRRILLPLYEVDDLRDAFRMLGF

SEQ ID NO: 63 - protein, 224 aa, Petromyzon marinus
  REGION 1..224: note = MISC_FEATURE - pmCDA-1 polypeptide sequence
MAGYECVRVSEKLDFDTFEFQFENLHYATERHRTYVIFDVKPQSAGGRSRRLWGYIINNPNVCHAELILMSMIDRHLESNPGVYAMTWYMSWSPCANCSSKLNPWLKNLLEEQGHTLTMHFSRIYDRDREGDHRGLRGLKHVSNSFRMGVVGRAEVKECLAEYVEASRRTLTWLDTTESMAAKMRRKLFCILVRCAGMRESGIPLHLFTLQTPLLSGRVVWWRV

SEQ ID NO: 64 - protein, 331 aa, Petromyzon marinus
  REGION 1..331: note = MISC_FEATURE - pmCDA-2 polypeptide sequence
MELREVVDCALASCVRHEPLSRVAFLRCFAAPSQKPRGTVILFYVEGAGRGVTGGHAVNYNKQGTSIHAEVLLLSAVRAALLRRRRCEDGEEATRGCTLHCYSTYSPCRDCVEYIQEFGASTGVRVVIHCCRLYELDVNRRRSEAEGVLRSLSRLGRDFRLMGPRDAIALLLGGRLANTADGESGASGNAWVTETNVVEPLVDMTGFGDEDLHAQVQRNKQIREAYANYASAVSLMLGELHVDPDKFPFLAEFLAQTSVEPSGTPRETRGRPRGASSRGPEIGRQRPADFERALGAYGLFLHPRIVSREADREEIKRDLIVVMRKHNYQGP

SEQ ID NO: 65 - protein, 209 aa, Petromyzon marinus
  REGION 1..209: note = MISC_FEATURE - pmCDA-5 polypeptide sequence
MAGDENVRVSEKLDFDTFEFQFENLHYATERHRTYVIFDVKPQSAGGRSRRLWGYIINNPNVCHAELILMSMIDRHLESNPGVYAMTWYMSWSPCANCSSKLNPWLKNLLEEQGHTLMMHFSRIYDRDREGDHRGLRGLKHVSNSFRMGVVGRAEVKECLAEYVEASRRTLTWLDTTESMAAKMRRKLFCILVRCAGMRESGMPLHLFT

SEQ ID NO: 66 - protein, 158 aa, Saccharomyces cerevisiae
  REGION 1..158: note = MISC_FEATURE - yCD polypeptide sequence
MVTGGMASKWDQKGMDIAYEEAALGYKEGGVPIGGCLINNKDGSVLGRGHNMRFQKGSATLHGEISTLENCGRLEGKVYKDTTLYTTLSPCDMCTGAIIMYGIPRCVVGENVNFKSKGEKYLQTRGHEVVVVDDERCKKIMKQFIDERPQDWFEDIGE

SEQ ID NO: 67 - protein, 194 aa, synthetic construct
  REGION 1..194: note = cytidine deaminase polypeptide sequence
MKPQIRDHRPNPMEAMYPHIFYFHFENLEKAYGRNETWLCFTVEIIKQYLPVPWKKGVFRNQVDPETHCHAEKCFLSWFCNNTLSPKKNYQVTWYTSWSPCPECAGEVAEFLAEHSNVKLTIYTARLYYFWDTDYQEGLRSLSEEGASVEIMDYEDFQYCWENFVYDDGEPFKRWKGLKYNFQSLTRRLREILQ

SEQ ID NO: 68 - protein, 192 aa, synthetic construct
  REGION 1..192: note = cytidine deaminase polypeptide sequence
MADSSEKMRGQYISRDTFEKNYKPIDGTKEAHLLCEIKWGKYGKPWLHWCQNQRMNIHAEDYFMNNIFKAKKHPVHCYVTWYLSWSPCADCASKIVKFLEERPYLKLTIYVAQLYYHTEEENRKGLRLLRSKKVIIRVMDISDYNYCWKVFVSNQNGNEDYWPLQFDPWVKENYSRLLDIFWESKCRSPNPW

SEQ ID NO: 69 - protein, 280 aa, synthetic construct
  REGION 1..280: note = cytidine deaminase polypeptide sequence
MDPQRLRQWPGPGPASRGGYGQRPRIRNPEEWFHELSPRTFSFHFRNLRFASGRNRSYICCQVEGKNCFFQGIFQNQVPPDPPCHAELCFLSWFQSWGLSPDEHYYVTWFISWSPCCECAAKVAQFLEENRNVSLSLSAARLYYFWKSESREGLRRLSDLGAQVGIMSFQDFQHCWNNFVHNLGMPFQPWKKLHKNYQRLVTELKQILREEPATYGSPQAQGKVRIGSTAAGLRHSHSHTRSEAHLRPNHSSRQHRILNPPREARARTCVLVDASWICYR

SEQ ID NO: 70 - protein, 555 aa, synthetic construct
  REGION 1..555: note = pYY-BEM3.1; tr|F7B644|F7B644_HORSE polypeptide sequence
MPRGRARERQRRNPMEKLDAEAFSFHFLNMEFVYDRNCSYLCYQVEGRLSGSPVLSEQGVFPNEVCGKTRRHAELCFLDWFRGRLSPDEYYCVTWFISWSPCSNCAREVAEFLKRHRNVELSIFAARLYYCRDHEQGLQSLCNRGAQLAVMLRKDFTYCWDNFVHNSGREFSPWENIDANSDLLARKLEDLLKNPMEKLHRKTFSFHFRNLKFAKGRKCSYLCYRVEGRLSGSPGLSEQGVFLNEVCDENCRHAELCFLHWFRGRLSPHADYRVTWFISWSPCSNCAREVAEFLKQHRNVELHISAARLYYWQRNKPGLRNLRSSGAQLAIMFFWDFRDCWDNFVHNSGRHFIPWKKINVNSRLLATKLEDLLKNPLEKLHPNTFSFHFCNLEFAYDRKYSYLCYQVEGRLSGSPGLSEQGVFLNEVCGKTRCHAELCFLDWFRVRLSPDEYYRVTWFISWSPCFYCAREVADFLKQYRNVKLSIFAARLYYCRDHAQGLRSLCSSGAQLAIMFFWDFRYCWDNFVHNSGREFRPWKKINVNSRLLATKLEDILK

SEQ ID NO: 71 - protein, 437 aa, synthetic construct
  REGION 1..437: note = pYY-BEM3.2; tr|D1LZA1|D1LZA1_PANTI polypeptide sequence
MEPWRPSPRNPMDRIDPKTFRFQFPNLRYASGRKLCYLCFQVERDYFYYNDSDWGVFRNEVHPWAPCHAEQCFLSWFRDQYPYRDEDYNVTWFLSWSPCPTCAEEVVEFLEEYRNLTLSIFTSRLYYFWHPNYQEGLCKLWDAGVQLDIMSCDEFEYCWDNFVYHKGMRFQRRNLLKDYDFLAAKLQEILSPGQQRKRDWPFPPRPGAQVDPRSWVQEVTEPGINTRRHPLHLLVSFLLPRPTMNPLQEDIFYRQFGNQHRVPKPYYYRRKTYLCYQLKLPEGTLIDKDCLRNKKKRHAEICFIDKIKSLTRDTSQRFEIICYITWSPCPFCAEELVAFVKDNPHLSLRIFASRLYVHWRWKYQQGLRHLHASGIPVAVMSLPEFEDCWRNFVDHQDRLFQPWRNLDQYSESIKRRLGKILTPLNDLRNDFRNLKLE

SEQ ID NO: 72 - protein, 440 aa, synthetic construct
  REGION 1..440: note = pYY-BEM3.3; tr|A0A3Q0DM17|A0A3Q0DM17_TARSY polypeptide sequence
MPMKRMYSNIYFDHFNNQRLLSGQNAPWLCFKVERVENCMLVPLETGVFGNQVSGCCGKTERPVEPTSLTRSVLVSPNPGTELRAQQPSRKGHLGKLGCVEYPSPGLALVMLGYGASTYCPDSSMYCPETCHHPEMCFLYWFEKTLSHEEQYQITWYVSWSPCVNCAEEVAEFLSVHPKVNLTIYAARLYCYQKLNHRQGLRRLCKEGACVKIMNYEEFDHCWENFVYNNYKSFKPWVKLQDNYELLATELDKILRIPMERMPQKKFRFHFQNLIAKDRNTTWLCFEVKNVRKKHPPDLLERGIFQNQVTPRINCHAEMCFLSWFLENMLLHGKRYQVTWYISWSPCSICAEEVAEFLSAHPKVSLTIYAARLYYFWVPGYRQGLRRLVEEGARVEIMNYEEFDYCWENFVSINNEPFQPWEGLHEKYGYLVTKLNNILG

SEQ ID NO: 73 - protein, 453 aa, synthetic construct
  REGION 1..453: note = pYY-BEM3.4; tr|A0A3Q0DNJ5|A0A3Q0DNJ5_TARSY polypeptide sequence
MEDNPEPRPRQQMDQDTFIFNFNNDPSVRGRHQTFLCYEVEHLDDDTWVPQDKYLGFLHNQPQSRSNAYCAYHAELCFLELVSSWQLDPAQRYRVTCFISWSPCSSCAQEVAAFLKKNRHVTLRILAARIYDYYQGYEDGLRTLQGVGVDITVMTSAEFGHCWNTFVDHQGSPFQPWEGLDQHSQVIWQRMQDILQVIPAKYLMEKVKYTVTVDILFKGRVPGPRYLMDQNTFTRNFINNLSVSGRRQTLLCYEVERLGGDIWVPLDQLRGFLLSQARDVLNYYQGRHAEPCFLDLVSSWQLDPAQHYRVTWFISWSPCTSCAQAVAAFLRENRHVTLRILAARIYDYHQGYEEGLRTLQRTGAHIDIMTFKEFGHCWNTFVNHKGSPFKSWTGLDQHSQALRKRLQDILHTMASSLWDQSEPKKPIPSQEVTLPESIPPSHGNRFRLVKRPS

SEQ ID NO: 74 - protein, 424 aa, synthetic construct
  REGION 1..424: note = pYY-BEM3.5; tr|G5AYU5|G5AYU5_HETGA polypeptide sequence
FCFLSCVHRKPIERIYKKAFRFYFRNLRCAYGRNKTFLCYEVKRERDNKVLHKGVVLNQVEPYMPLHAELRFLSWFHDTLLCPLGSYQVTLYVSWSPCSECAEELTTFLAGHRNVTMTIYVAQLYYCNWKSPNREGLKILIAEDARLRVMFYDEFLYCWRNFVKNDYNNFDPWSLLDENSRYHNRILQNILKGWGRPHRVGPEGEQTATPGGSGGHCISVFSLLRRREMTLKEETFRVQFNNAYKAPKPYRRRVTYLCYQLQEANGDPLTKGCLRTKKGYHAESRFIKRICSMDLGQDQSYQVTCFLTWSPCPHCAQELVSFKRAHPHLRLQIFTARLFFHWKRSYQEGLQRLCRAQVPVAVMGHPEFAYCWDNFVDHQPGPFEPPWAKLEYYSSCLKRRLQQILRSWGVDDLTNDFRNLQLGP

SEQ ID NO: 75 - protein, 385 aa, synthetic construct
  REGION 1..385: note = pYY-BEM3.6; tr|A0A2Y9QMV5|A0A2Y9QMV5_TRIMA polypeptide sequence
MLSSPQTPGTRKPMKTLAPDEFSFNFENLRLAHGRNTTFLCFQVETKAPPSLNSPDSGIFQNQDHCPSHHHAEMVFLTWFQKRLSPAQHYEVTWYMSWSPCSRCAVQVAKFLKSNSTVNLSIFVARLYYPRELETKDGLHSLWQAGAQVQIMFFQDFKYCWENFVNNEGKPFQPWKNLDENSKDWDTELKDIHRNTTDLLTEEMFYSQFYNREKKSSIPRKTYLCYQLNEPQPVKRCLHYKKGYHAVTRFIDGIVSMNLDPARSYDITCYFTWSPCNRYARKLVSFIEDYPNLRLKVYTSRLYFHWCWTNMQGLQHLQNSRVTVAVMTFRDFEYCWKNFVDNQGKPFEPWEKLDLYSQSTERRLRRILKPLTPDVLNEDFGNLHL

SEQ ID NO: 76 - protein, 381 aa, synthetic construct
  REGION 1..381: note = pYY-BEM3.7; tr|H0XHI0|H0XHI0_OTOGA polypeptide sequence
LSCAFRDPMNRMYPKTFCQNFEKEPCPSNQNSSWLCFEVETKNSAVFFHRGVFRNQPAPPPRAPTSVLLSQGPVKTPCHAEECFLTWIQGVLPPDHHYHVTWYVSRGPCANCANLIVHFLAMHRRVTLTIFAAHLNFFWESDFQQGLLRMDQEGVQLHIMGYEEFEYCWDNFVYNQRKQFVPWNGLNENYEFMVSTLEDILRSPLDRIRQKDFSIHFRNSLWLDDKSTWLCFEVKRTKSPVPLYRGVFRNQSPPKTPCHAEVRFFTWLQDLPPDFCCQFTWYLSWSPCADCADLVANFLAKHRNVSLTIFVARLYYYRDPEMHRGLRRMYQEGANVDIMSVIEFEYCWDNFVYNQGKQFVPWNGLNENYEFLVPRLQEILE

SEQ ID NO: 77 - protein, 337 aa, synthetic construct
  REGION 1..337: note = pYY-BEM3.8; tr|A0A3M0K4Y7|A0A3M0K4Y7_HIRRU polypeptide sequence
MYISKKALRRHFDPRVYPRETYLLCELQWEGSRRVWIHWIRNVPDHHAEEYFLEEVFEPRNYGFCNITLYLSWSPCCTCCSKIRDFLKRNPNVKIDIRVARLIYPDYAETRSSLRELNGLQRVSIQVMEAAGLSCIESKNHRISQVERDPKGSSSPTLFTLQDHLKLSNMTESVIQDSVSIQICYQMRILGFQCHIRWKLQPEDFQRNYSPNQIGRVVYLLYEVRWRRGSIWRNWCSNNPEQHAEVNFLENHFHHRPQTPCSITWFLSTSPCGKCSRRILEFLKSQPNVTLEIYAAKLFRHHDIRNRQGLRNLMMNGVTIYIMNLEGNPASLCLSVD

SEQ ID NO: 78 - protein, 237 aa, synthetic construct
  REGION 1..237: note = pYY-BEM3.9; tr|A0A3P4LUZ8|A0A3P4LUZ8_GULGU polypeptide sequence
MSFEDYEYCWETFVDHKGMYFQSWDLLRDNDLLAAELKNILRSTMNPLRQEIFYHQFGNQPRAPRPYHRRKTYLCYQLQPHEGPITARVCLQNKKKRHAEIRFIDNIRALRLDRSQTFEITCYLTWSPCPTCAKALAVFVQDHPHISLRLFASRLFIHWCWKYQEGLRLLHRSRIPVAVMRLQEFEDCWRNFVDNQDEPFQPWNKLEQYSESITRRLRRILGHPQNNLENDFRNLHI

SEQ ID NO: 79 - protein, 221 aa, synthetic construct
  REGION 1..221: note = pYY-BEM3.10; tr|G5BPM8|G5BPM8_HETGA polypeptide sequence
RRRIEPWQFEASFDPRQLRRETCLLSEVRWGTSPRAWRGCSLNTARHAEVSFMDRLTSEGRLRGPVRCSITWFLSWSPCGACAQAIGEFLRQHPNVSLVIYIARLFWHVDEQNRQGLRDLVTRGVRMQVMSDPEFAHCWRNFVNYSPGQEARWPQVPPVWTWLYSLELHCILLNLPPCLKISRRHHNQLTFFQLILQNCHYQAIPSPVLLASGLIHPFVTW

SEQ ID NO: 80 - protein, 211 aa, synthetic construct
  REGION 1..211: note = pYY-BEM3.11; tr|H2M862|H2M862_ORYLA polypeptide sequence
MITKLDSVLLPKKKFIYHYKNMRWARGRHETYLCFVVKRRVGPESLSFDFGHLRNRNGCHVELLFLRHLSALCPGLWGYGATGQGRVSYSITWFCSWSPCANCSFRLAQFLSQTPNLRLRIFVSRLYFCDLEDSREREGLRMLKKVGVHITVMSYKDYFYCWQTFVARKQSKFKPWDGLHQNSVRLSRKLNRILQPCETEDFRDAFKLLGL

SEQ ID NO: 81 - protein, 353 aa, synthetic construct
  REGION 1..353: note = pYY-BEM3.12; tr|H0Y0C6|H0Y0C6_OTOGA polypeptide sequence
MYLKTFYRHFNNRPYLSRRNDTWLCFEVKTTSSNSPGSFYSGVFRNQGPRYCPWHTELCFLTWVRPIVSHHHFYQITWYMSWSPCANCAWQVATFLATHENVSLTNYTVRIYYFWRQDYRQGLLRMIEEGTQVYVMSSKEFQHCWENFVDHWGTRWVTCWNRLKKNYEFLVTRLSEILSDPKERISPNTFYNQFNNTPVPRGRKDTWLCFEVKEKNSNSPGSFHRGVFQNQVFSGTSSHARRCPPDHHYEVTWYTSWSPCAHCAWHVVNFLTSNPNVSLTIFAARLYYIYRPEIQQGLRRVFQEGAKVHIMSLKEFKYCWAKLVYNSGMRFMPWYQFNFNFLFPNTTLKGDLH

SEQ ID NO: 82 - protein, 189 aa, synthetic construct
  REGION 1..189: note = pYY-BEM3.13; tr|A0A3Q2Z5X6|A0A3Q2Z5X6_HIPCM polypeptide sequence
MDVHFMNFIYHYKNMRWAKGRNETYLCFVVKRRVGPNSLTFDFGHLRNRNGCHVELLFLRYLGRRLSYSITWFCSWSPCANCSAALSQFLSRMPNLRLRIFVARLYFCDMEDSHEREGLRLLQKAGVQVTVMSYKDYYYCWQTFVDRKKSHFKAWEDLHQNSVRLSRKLNRILQPCEMDLRDAFKLLGL

SEQ ID NO: 83 - protein, 190 aa, synthetic construct
  REGION 1..190: note = pYY-BEM3.15; tr|A0A2K6NY90|A0A2K6NY90_RHIRO polypeptide sequence
MNPHIRNPMEAMYPGTFYFHFKNLWEADNRNESWLCFAVEVIKHHSTVSWKRGVFRNQVDPETHCHAEKCFLSWFCDNTLSPKKNYQVTWYTSWSPCPECAREVAKFLARHSNVMLTIYTARLYYSQYPNYQEGLRRLNEEGVPVEIMDYEDFKYCWENFVYNGDELFKPWKGLKYNFLFLDSKLQEILE

SEQ ID NO: 84 - protein, 202 aa, synthetic construct
  REGION 1..202: note = pYY-BEM3.16; tr|Q6ICH2|Q6ICH2_HUMAN polypeptide sequence
MNPQIRNPMERMYRDTFYDNFENEPILYGRSYTWLCYEVKIKRGRSNLLWDTGVFRGPVLPKRQSNHRQEVDPETHCHAERCFLSWFCDDILSPNTNYEVTWYTSWSPCPECAGEVAEFLARHSNVNLTIFTARLCYFWDTDYQEGLCSLSQEGASVKIMGYKDFVSCWKNFVYSDDEPFKPWKGLQTNFRLLKRRLREILQ

SEQ ID NO: 85 - protein, 202 aa, synthetic construct
  REGION 1..202: note = pYY-BEM3.17; tr|G8GPV1|G8GPV1_CERNE polypeptide sequence
MDGSPASRPGHVMDPGTFTSNFNNKPWVSGQRETYLCYKVERSHNDTWVLLNQHRGFLRNQAKNRLHGDYGCHAELCFLGEVPSWRLDPTQTYRVTWFISWSPCFSGGCAEQVRAFLQENTHVRLRIFAARIYDYDFLYQEALRTLRDAGAQVSIMTYEEFKHCWDTFVDHQGRPFQPWDGLDEHSQALSGRLQAILQNQGN

SEQ ID NO: 86 - protein, 181 aa, synthetic construct
  REGION 1..181: note = pYY-BEM3.18; tr|Q1WBT6|Q1WBT6_SYMSY polypeptide sequence
MALLTAKTFRLQFNNKRRVTKPYYPRKALLCYQLTPQNGSTPTRGYFKNKKKRHAEIRFINKIKSMGLDETQCYQVTCYLTWSPCPSCAWELVDFIKAHDHLNLGIFASRLYYHWCRHQQEGLRLLCGSQVPVEVMGFPEFADCWENFVDHEEPLSFNPSEMLEELDKNSRAIKRRLEKIK

SEQ ID NO: 87 - protein, 211 aa, synthetic construct
  REGION 1..211: note = pYY-BEM3.19; tr|A0A3B4CS14|A0A3B4CS14_PYGNA polypeptide sequence
MDNTNRRKFIYHYKNVRWARGRHETYLCFVVKKRNSPDSLSFDFGHLRNRNGCHVELLFLRYIEVLCPGLWGSGVDGVRVSYAVTWFCSWSPCSNCAQRLTNFLSQTPNLRLRIFVARLYFCDEEDSLEREGLRHLQRAGVQITVMTYKDFFYCWQTFVASRERCFKAWEGLRQNSVRLSRKLNRILQVFISTPVISPLITTHLGQSWAGG

SEQ ID NO: 88 - protein, 315 aa, synthetic construct
  REGION 1..315: note = pYY-BEM3.20; tr|A0A087XZI4|A0A087XZI4_POEFO polypeptide sequence
RKVSYSVTWFCSWSPCANCSIRLAQFLHQTPNLRLRIFVSRLYFCDLEDSREREGLRILKKAGVHITVMSYKDYFYCWQTFVAKSQSKFKPWDGLHQNYIRLSRKLNRILQPALDIKKFIYHYKNLRWARGRCETYLCFVVKKKLHLFMFVIVGRNRLFDLNVTMNNKSLYLIPLHLQLLFLRHLGALCPGLWGYGVTGERKVSYSVTWFCSWSPCANCSIRLAQFLHQTPNLRLRIFVSRLYFCDLEDSREREGLRILKKAGVHITVMSYKDYFYCWQTFVAKSQSKFKPWDGLHQNYIRLSRKLNRILQVQFF

SEQ ID NO: 89 - protein, 189 aa, synthetic construct
  REGION 1..189: note = pYY-BEM3.21; tr|A0A341AEK4|A0A341AEK4_9CETA polypeptide sequence
MASDRGPSAGDATSRRRIEPWEFEVSFDPRELCKETRLLYEIKWGRSQHVWRHSGKNTTNHVECNFIEKFTSERPFHRSVSCCITWFLSWSPCWECSKAIREFLNQHPRVTLFIYVARLFQHMDPQNRQGLRDLIHSGVTIQIMGPTEYDYCWRNFVNYPPGKEAHWPRYPPPLMKLYALELHCIILVP

SEQ ID NO: 90 - protein, 180 aa, synthetic construct
  REGION 1..180: note = pYY-BEM3.22; tr|E2D879|E2D879_MUSMI polypeptide sequence
RNLISRETFNFNFENLCYAKGRKNTFLCYEVTRKDCDSPVSLCHGVFKNKGSIHAEICFLYWFHDKVLKVLTPREEFKVTWYMSWSPCFECAEQVVRFLATHHNLNLTIFSSRLYNVSDPDTQQKLCRLVQEGAQVAVMDLSEFKKCWEKFVDNDGQQFRPWKRLRTNFRYQNSKLQEIL

SEQ ID NO: 91 - protein, 221 aa, synthetic construct
  REGION 1..221: note = pYY-BEM3.23; tr|A0A2K5RDN6|A0A2K5RDN6_CEBCA polypeptide sequence
MWEAQSPGLSREWGSVAISPEDPGPLHIGRFLSCAFRHPMNAMYPGIFNFHFRNLRKAYGRNETWLCFTVEGIMNRSTVSWKSGVFRNQVGSDPFCHAEMCFLSWFRHNMLSPKKDYEVTWYASWSPCPECAGQVAEFLARHGNVRLTIFTAHLYYFWNPSFRQGLRRLSQEGASVLIMGYEDFEYCWDNFVYNDGQPFKPWKRLQDNSLSLYITLQEILQ

SEQ ID NO: 92 - protein, 206 aa, synthetic construct
  REGION 1..206: note = pYY-BEM3.24; tr|A0A2K5RDN7|A0A2K5RDN7_CEBCA polypeptide sequence
MEASPASRPRPLMGPRTFTENFTNNPEVFGRHQTYLCYEVKCQGPDGTRDLMTEQRDFLCNQARNLLSGFDGRHAERCFLDRVPSWRLDPAQTYRVTCFISWSPCFSCAREVAEFLQENPHVNLRIFAARIYDCRPRYEEGLQMLQNAGAQVSIMTSEEFRHCWDTFVDHQGHPFQPWEGLDEHSQALSRRLQAILQGNRWMILSL

SEQ ID NO: 93 - protein, 184 aa, synthetic construct
  REGION 1..184: note = pYY-BEM3.25; tr|A0A1C9CJ69|A0A1C9CJ69_CERAL polypeptide sequence
NPMKAMDPHIFYFHFKNLRKAYGRNETWLCFAVEIIKQRSTVPWRTGVFRNQVDPESHCHAERCFLSWFCEDILSPNTDYRVTWYTSWSPCLDCAGEVAEFLARHSNVELAIFAARLYYFWDTHYQQGLRSLSEKGASVEIMGYEDFKYCRENFVCDDGKPFKPWKGLKTNFRFLKRRLQEILE

SEQ ID NO: 94 - protein, 197 aa, synthetic construct
  REGION 1..197: note = pYY-BEM3.26; tr|A0A2R2Z4D2|A0A2R2Z4D2_PTEAL polypeptide sequence
MHLQVWRKVTEAWREGYTLKPWSRNPMERLYHDYFYFHFYNLPTPKHRNGCYICYQVEGTKKHSRMPLLRGVFENQESLDMMLSPGEKYRVTWYISWSPCFACVDEVIKFLREHTNVELIIFAARLYHSDILQYRQGLRKLHDAGVHVAIMSYYEFKHCLNDFVFHQGRSFCPWNDLNKNSKNLSNTLEDILRNQED

SEQ ID NO: 95 - protein, 206 aa, synthetic construct
  REGION 1..206: note = pYY-BEM3.27; tr|B7T161|B7T161_SHEEP polypeptide sequence
MTEGWAGSGLPGRGDCVWTPQTRNTMNLLRETLFKQQFGNQPRVPPPYYRRKTYLCYQLKELDDLMLDKGCFRNKKQRHAEIRFIDKINSLNLNPSQSYKIICYITWSPCPNCASELVDFITRNDHLNLQIFASRLYFHWIKPFCRGLHQLQKAGISVAVMTHTEFEDCWEQFVDNQLRPFQPWDKLEQYSASIRRRLQRILTAPT

SEQ ID NO: 96 - protein, 205 aa, synthetic construct
  REGION 1..205: note = pYY-BEM3.28; tr|A0A2R2X2G4|A0A2R2X2G4_PTEAL polypeptide sequence
MAGLGQACEGCCGQMPEISYPMGRLDPKTFSFEFKNLPYAYGRKSSYLCFQVEREQHSSPVPSDWGVFKNQFCGTEPYHAELCFLNWFRAEKLSPYEHYDVTWFLSWSPCSTCAEEIAIFLSNHKNVRLNIFVSRIYYFWKPAFRQGLQELDHLGVQLDAMSFDEFKYCWENFVDNQGMPFRCWKKVHQNYKSVLRKLNEILRRR

SEQ ID NO: 97 - protein, 309 aa, synthetic construct
  REGION 1..309: note = pYY-BEM3.29; tr|G1Q1M4|G1Q1M4_MYOLU polypeptide sequence
YAELSFLDLFQSWNLDRGRQYRLTWYMSWSPYPDCAQKLVEFLGENSHVTLRIFAADIHSLCSGYEDGLRKLRDARAQLAIMTRDELQYCWVTFVDNQGQPFRPWPNLVEHIKTKKQELKDILGNPMRRMYPKTFNFNFQNLNSYGRKSTFLCFEVETWEDGSVLDYQNGVFQNQLDPGHAELCFIEWFHEKVLFPDEVRCPDAQYHVTWYISWSPCFECAEQVAGFLNEHENVDLSISAARLYLCEDEDEQGLQDLVAAGAKVAMMAPEDFEYCWDNFVYNRGWPFTYWKHVRRNYGRLQEKLDEILW

SEQ ID NO: 98 - protein, 216 aa, synthetic construct
  REGION 1..216: note = pYY-BEM3.30; tr|A0A1S3AN78|A0A1S3AN78_ERIEU polypeptide sequence
RRIEPWEFEDFFDPRQFRPETCLLYEVRWGSSRNAWRSTARNTTRHAEVNFLERFAAERHFDKPVSCSITWFLSWSPCWECSQAIGAFLSQHPQVTLAIHVTRLFHHEDEQNRQGLRDLLARGVTLQVMGDSEYAHCWRTFVNSPPGAEGHYPRYPSDFTRLYALELHCIILGLPPCLEILRRYQNQFTLFRLVPQNCHYQMIPHLNFFVVRHYFF

SEQ ID NO: 99 - protein, 201 aa, synthetic construct
  REGION 1..201: note = pYY-BEM3.32; tr|Q4VUI3|Q4VUI3_XENLA polypeptide sequence
MTMDSMLLKRNKFIYHYKNLRWARGRHETYLCYIVKRRYSSVSCALDFGYLRNRNGCHAEMLFLRYLSIWVGHDPHRNYRVTWFSSWSPCYDCAKRTLEFLKGHPNFSLRIFSARLYFCEERNAEPEGLRKLQKAGVRLSVMSYKDYFYCWNTFVETRESGFEAWDGLHENSVRLARKLRRILQPPYDMEDLREVFVLLGL

SEQ ID NO: 100 - protein, 191 aa, synthetic construct
  REGION 1..191: note = pYY-BEM3.33; tr|E2RL86|E2RL86_CANLF polypeptide sequence
MNPLQEETFYQQFSNQRVPKPTYQRRTYLCYQLKPHEGSVIAKVCLQNQEKRHAEICFIDDIKSRQLDPSQKFEITCYVTWSPCPTCAKKLIAFVNDHPHISLRLFASRLYFHWRQKYKRELRHLQKSGIPLAVMSYLEFKDCWEKFVDHKGRPFQPWNKLKQYSESIGRRLQRILQPLNNLENDFRNLRL

SEQ ID NO: 101 - protein, 226 aa, synthetic construct
  REGION 1..226: note = pYY-BEM3.34; tr|G1LWB0|G1LWB0_AILME polypeptide sequence
SSAAPASIHLLDEDTFTENFRNDDWPSRTYLCYKVEGPDQGSGVPLGQDKGILHNKPAQGPEPSRHAECYLLEQIQSWNLDPKLHYGVTCFLSWSPCAKCAQKMARFLQENSHVSLKLFASRLYTRERWDEDYKEGLRTLKRAGASIAIMTYREFEHCWKTFVLHDQEGSCFQPWPFLHKESQKFSEKLQAILQVGVLLLSLPPPLPSSPLSSPWPFPAPLRASTG

SEQ ID NO: 102 - protein, 238 aa, synthetic construct
  REGION 1..238: note = pYY-BEM3.35; tr|A0A1U7S7K7|A0A1U7S7K7_ALLSI polypeptide sequence
MGEHWQYAGSGEYIPQDQFEENFDPSVLLAETHLLSELTWGGRPYKHWYENTEHCHAEIHFLENFSSKNRSCTITWYLSWSPCAECSARIADFMQENTNVKLNIHVARLYLHDDEHTRQGLRYLMKMKRVTIQVMTIPDYTYCWNTFLEDDGEDESDDYGGYAGVHEDEDESDDDDYLPTHFAPWIMLYSLELSCILQGFAPCLKIIQGNHMSPTFQLHVQDQEQKRLLEPANPWGAD

SEQ ID NO: 103 - protein, 220 aa, synthetic construct
  REGION 1..220: note = pYY-BEM3.36; tr|A0A2R2X2J8|A0A2R2X2J8_PTEVA polypeptide sequence
MPRIGNMNLLSEKTFNYHFGNQLRVKKPQGRRRTYLCYKLKLPNETLVKGYFINKKKNHAEIRFINKIRSLNLDQTQSYKITCYITWSPCSYCAGKLVALVKSCPHLSLQIFTSRLYYHWLWKNQAGLRYLWKINISVLVMKEPEFADCWDNFVNHQSRRFKPWEKLTQYSNSTERRLLRILRINRTDLFLAQSSEQDPGLNDLVDAIKRLFLDAHRPRD

SEQ ID NO: 104 - protein, 198 aa, synthetic construct
  REGION 1..198: note = pYY-BEM3.37; tr|A0A151P6M4|A0A151P6M4_ALLMI polypeptide sequence
MAVEEEKGLLGTSQGWKIELKDFQENYMPSTWPKVTHLLYEIRWGKGSKVWRNWCSNTLTQHAEVNCLENAFGKLQFNPPVPCHITWFLSWSPCCQCCRRILQFLRAHSHITLVIKAAQLFKHMDERNRQGLRDLVQSGVHVQVMDLPDYRYCWRTFVSHPHEGEGDFWPWFFPLWITFYTLELQHILLQQHALSYNL

SEQ ID NO: 105 - protein, 158 aa, synthetic construct
  REGION 1..158: note = pYY-BEM3.38; tr|A0A2K6MNR2|A0A2K6MNR2_RHIBE polypeptide sequence
IWLCFTMEIIKQCSTVSWKRGVFRNQVDPETHCHAERCFLSWFWEDTLSPNTNYQVTWYTSWSPCLDCAGEVAEFLARHSNVKLAIFAARLYYFWDTDYQQGLRSLSEEGTSVEIMGYEDFKYCWENFVYNGDEPFKPWKGLKYNFLFLDSKLQEILE

SEQ ID NO: 106 - protein, 182 aa, synthetic construct
  REGION 1..182: note = pYY-BEM3.40; tr|F1CGT0|F1CGT0_ANOCA polypeptide sequence
KAAILLSNLFFRWQMEPEAFQRNFDPREFPECTLLLYEIHWDNNTSRNWCTNKPGLHAEENFLQIFNEKIDIKQDTPCSITWFLSWSPCYPCSQAIIKFLEAHPNVSLEIKAARLYMHQIDCNKEGLRNLGRNRVSIMNLPDYRHCWTTFVVPRGANEDYWPQDFLPAITNYSRELDSILQD

SEQ ID NO: 107 - protein, 230 aa, synthetic construct
  REGION 1..230: note = pYY-BEM3.41; tr|C7AGG3|C7AGG3_HORSE polypeptide sequence
MDPQAPTQRGGLGQAYQGGDYVQAPGNGNTQHLLSEDVFKKQFGNQRRVTKPYYRRKTYVCYQLKLLRGPTIAKGYFRNKKKRHAEIRFIDKINSLGLDQDQSYEITCYVTWSPCATCACKLIKFTRKFPNLSLRIFVSRLYYHWFRQNQQGLRQLWASSIPVVVMGYQEFADCWENFADNRGNPFQSWEKLTEYSKGIKRRLQKILEPLNLNGLEDAMGNLKLGSVDLG

SEQ ID NO: 108 - protein, 197 aa, synthetic construct
  REGION 1..197: note = pYY-BEM3.42; tr|A0A250YMK7|A0A250YMK7_CASCN polypeptide sequence
MSLLKEDIFLYQFNNQQQVQKPYFRRRTYLCYQLEQPNGSRPQWPAKGCLQNKKGHHAEIRFIKRIHSMGLEQDQDYQITCYITWSPCLACACALAELKNHFPRLTLRIFASRLYFHWIRKFQMGLQHLYKSGVLVAVMSLPEFTDCWEKFVNHRQVFFTPWDKLEEHSRSIQRRLRRILQSWDVDDLTDDFRNLRL

SEQ ID NO: 109 - protein, 189 aa, synthetic construct
  REGION 1..189: note = pYY-BEM3.43; tr|B7T160|B7T160_SHEEP polypeptide sequence
MPWISDHVARLDPETFYFQFHNLLYAYGRNCSYICYRVKTWKHRSPVSFDWGVFHNQVYAGTHCHSERRFLSWFCAKKLRPDECYHITWFMSWSPCMKCAELVAGFLGMYQNVTLSIFTARLYYFQKPQYRKGLLRLSDQGACVDIMSYQEFKYCWKKFVYSQRRPFRPWKKLKRNYQLLAAELEDILG

SEQ ID NO: 110 - protein, 541 aa, synthetic construct
  REGION 1..541: note = pYY-BEM4.1; tr|A0A182D0J1|A0A182D0J1_BLAVI polypeptide sequence
MTNPESPPQAPCDFNEDALLNREPLRGSPIKFVSPVDYPDLVFALAGPVGVDIDYIQQSISDCLKSFDYSTEFIRITEIMQDIKCSKTIDCTDMLKEYQSKIEYANELRRAYRAKDLLAALTISAISKLREQIKERDEATNKSNIQPSRRKLAWVVRQLKTPEEVRLLRAVYGKQFVLVSIYSSPQRREDFLISKIKIKSRGTIDNNTSSEGAQRLIERDSKEDNEYGQNLSGTFCLGDIFVDSNNKESAIVSIDRFLNAFFGSNEISPTRDEYGMYLAKTASLRSCDLSRQVGAAIFSKTGEIISLGSNEVPKAGGGTYWTGDNADSRDIRLGHDPNEINKVEIFAEIISRLLEDKLLSNDLLNKDAASIVTILLSKNEGKRYKDLRVMDIIEFGRIIHAEMSAICDAARNGRAIIGATLFCTTFPCHLCAKHIVASGIGRIVYLEPYPKSYAKKLHSDSIQVEDHSDSEKVSFEPFIGISPSRYRELFEGGRRKDPFGEALKWKNDPRKPVIDVVVPPHFEAEKLVIAQLGKLIVSGTG

SEQ ID NO: 111 - protein, 330 aa, synthetic construct
  REGION 1..330: note = pYY-BEM4.2; tr|A0A2D6EXD2|A0A2D6EXD2_9ARCH polypeptide sequence
MIIGLVGTIGAGKQTIIDYLQEKYGYNALSCSDVLREILKKQGKPVTRDNLREIGNKTREEGGNGAIAKILLEKLRNNWKANYIVDSLRHPDEVSVLRTSPLFHLVAVDADLRIRFERVKARKREEEPTTLPAFVERDQKEMFGTGNEQRIRETMELADELVLNNGTVEELKQRIDDLNLVSDERLRPSWDDYFMRLARLAAQRSNCMSRKVGAIITKDRRVIATGYNGTPRGVKNCNEGGCERCNSAVAKGTAISECLCLHGEENAIIEAGRVRSEGATIYTSFLPCLWCTKMIIQAGLKEVVFSEVYDLHEASIKLFETSGVLIRRLK

SEQ ID NO: 112 - protein, 367 aa, synthetic construct
  REGION 1..367: note = pYY-BEM4.3; tr|F7YVM7|F7YVM7_9THEM polypeptide sequence
MNEFKYMSLALKLAKKGKYTTSPNPMVGAVIVKDGKILATGYHKKAGQPHAEINALSKLNFQAQNCEMYVTLEPCSHYGRTPPCADAIIRSGIRKVVIATLDPNPLVNGKGVEKLKNAGIEVVCGVLEEKAKKLNEKFFKYITTKIPFVALKIAQTLDGKIALKNGESKWITSEKSREYVHKLRMEYDAVLTGIGTILKDDPQLNVRLKKVYKQPLRIILDSKLKIPLSAKVLEDPSKVIILTTALADKEKLEELRSKGVEVIITNEKNGIVDLESALKILGEKKITSVMVEAGPTLLTSFLKESLFDKIYLFIAPKIFGADSKSVFSELGLEDISKSQKFSLESVKKIGEDLLLELYPKQLKKLEE

SEQ ID NO: 113 - protein, 449 aa, synthetic construct
  REGION 1..449: note = pYY-BEM4.4; tr|A0A3M6UNF1|A0A3M6UNF1_9CNID polypeptide sequence
MEEKSELENELMRSTSPKPSVPNGSKGNECEQRETRITKENLYMVLALWMEEFPVVEQTSSAKRLNKVGVVFVLPTDRVLAADCSRDGVHGVARVMVNHCGKLEGCKVFVSRKPCSLCAKLLVQSKVSRVFYLPIEPESENKGEIARADNLFKNSSVGQSVFVPCVEQKVLDKLEDKLPKEIITPDDISECRDNLLKKCGWSAEWFARAQASLPWPCFEGKMKSQVDNDFKSLIKWIAVVKAPMDKGVAFPKVKLTSDSRVVPDCDADNFPDSKTAYHMMIFAKMLARQTDDPKTGVGAVIVRGKVPDIVSLGWNGFPSKALYGEFPRASDDDRALQKKFPYVIHAEQNALMVRNVKDLTDGILFVTKPPCDECAPMIKLSGVKTIVIGEKIEKSRGGELSYNLIKEYIKEGIMTCYQMEATKTKAKRLASDPETRKRLKSSCSNSNDV

SEQ ID NO: 114 - protein, 414 aa, synthetic construct
  REGION 1..414: note = pYY-BEM4.5; tr|A0A2G3K826|A0A2G3K826_9BURK polypeptide sequence
MTKIIDDVNTAAAAVLDQATAAANQTTFAVGGVMVNNQTGEVISAIHNNVIIPLSNNVSFTFDPTAHGERQLVYWYYANKEALKLPEPNQITVITSLDPCAMCTGALLTAGFNVGVVAIDTYAGINCAQNFQFATLPANLRTKAQKNFGYYASGAANFKPLTRSYVGGPSVAFKNGVVTPANLRDCGTVFTQSVDTVRNTSNSTGLAPSQMSNPAELPSNSAILQAYRAIYKKAFTIKIDNPRLPDAQILTELKAVLADAPNARNAVAFIDPFGNLVLCMADAFNTSPVHAAFMNVTQEYAKTRWDLMNKYAQASTTDNPALYLTHPKYGTFVYLYAPDPDDSITIMSLGAYGSTMEGPIPNMFPSNLQFYYPPRNGAQFSELVPVVNELPPFYTQNVNISLMQVPGVTQAPTK

SEQ ID NO: 115 - protein, 308 aa, synthetic construct
  REGION 1..308: note = pYY-BEM4.6; tr|K1ZCJ4|K1ZCJ4_9BACT polypeptide sequence
MSSRAKKNRSTNLKKSIGQKSIENKPTDQKKDQVLVAYVPVIHEGYRRFFRHFPAVKELWLISQELSHELRSLQKDIRALKASETKKLLQTWGQFQKIKLLTPSSLAILQKTTTQLVFPDEEISHHLVEKYFAQNRVLFASFFLRWDKKSSLKKHDLQEYSEISNKEFDQMMIAIAQQEADKSDDWWRQVGGLIFKDETILLLAHNQHTPTEAEAYFAGDPRADFHQGEYLKISTAIHAEAYLIAQAAKQGISLEGADLYVTTFPCPVCAKQVAYSGIKRVFFREGYSLLDGETILKANGVKLIRVTV

SEQ ID NO: 116 - protein, 615 aa, synthetic construct
  REGION 1..615: note = pYY-BEM4.7; tr|A0A1G3PNQ8|A0A1G3PNQ8_9SPIR polypeptide sequence
MRDLPLLVLGLTGPMGAGCTRFARDISKMEPGKVIKKQGLLDQVAHEISELSKKASEIRLQCISNGKNSELAELKRLNRRLNAKLAERACLHVIAKSSLPEPLFISLNTIVIKIAVDSITAPEFAEWAKNHAKVADLLKWLRTQWESELTLYETWGQDAGRFSQDELEKMDAMFAEFERIGDEILKEDFETYFGKRNNDFSIRMFSENIRLSGNPFRPAENGGGGGKYDEPSMVMIARETDRYIRFYRTRSDQKRSHFFIIDEIKNPREAEYFRARHQNFFLVSIFSSSEIRASRMRRGLGHDAGVSDADFQHLFRELDSRDWGADDFDAHGLHRQNIYRCFNLADIAINNDVEDERFSEVLFNKFIRYYALMLSPGCVQPTPQETYMHLAYSLSLRSTCISRQVGAVITDLEDRILSLGWNEVPEGQIGCGLKVKKDYTDKENPLFEMEIWDNVITAEDLAVWDDEDSICVKDILSRIEIKTKLKSVSLTPEERADVLKALRIKRLEYSRSLHAEENAILQVASRGGVGLKDGTIYVTTFPCELCSKKIYQVGISKIYYTEPYPNSISEKVILKDGIRNIKILQFEGVKSYSYFKLFKPGFDKKDAQMLEGRGI

SEQ ID NO: 117 - protein, 291 aa, synthetic construct
  REGION 1..291: note = pYY-BEM4.8; tr|A0A1G0PGF4|A0A1G0PGF4_9BACT polypeptide sequence
MKHNNQLRKEIEKLLGQNSIIKNDELKKLQKEYKIETDELLISFLPYAAEFAKVPISKYKVGAVVLGKSGNIYFGSNMEFEAGALSATVHAEQSAVNNAWLNGETGINKIAVTAAPCGYCRQFLNELTTAKQLHVLLKDKNLEAAKVFKLTELLPEAFGPRDLEIEGGLMKVENHKLKIENINDELINAALEAANKSYAPYSKNYSGVSIQLSDGTIFSGRYSENAAYNPSLLPFQSALAFMNMNTKKGSNNKIVDAVLVEAVSNISQKDAAGTLLNSISKTKLRYYKIKN

SEQ ID NO: 118 - protein, 398 aa, synthetic construct
  REGION 1..398: note = pYY-BEM4.9; tr|A0A0P4WGY5|A0A0P4WGY5_9EUCA polypeptide sequence
MEENSSATSQPKCASRTKQGGNDLSTDMSNLSVGETKRTDFLPWDDYFMAVAFLSAMRSKDPSSQVGACIVNADKKIVGIGYNGMPIGCSDDELPWNKESLDPLQTKYMYVCHAEMNAIMNKNSSDLAGCCVYVALFPCNECAKLVIQAGIREVVFFSDKHQQKPETVASKKMLNMAGVAYRQYTPSQSKIELNLSLKEQEKSEPTADITQSSERDQNSKRKDYLSWEEYFMAMAHLSALRSKDPITQVGACIVNSKKKIVGIGYNGMPLGCNDDLMPWGNSSSNKLETKYMYVCHAGVNAIMNKNSCDVSGCTLYVALFPCNECAKVIIQAGIKTIIYASDTNKDQASILASKKMLDMAGIKYRADNLSQRKIVIDFKTIDWNSRFMNDHQNDPTCL

SEQ ID NO: 119 - protein, 259 aa, synthetic construct
  REGION 1..259: note = pYY-BEM4.10; tr|A0A3D8IG27|A0A3D8IG27_9HELI polypeptide sequence
MRKNILYFILTLFFLSGLYATSLPEDNVVSGVIYEKIDTVSAEVDHIYPMLALAIVYKDWQEKNMLNKQGHNIGLVIVDENNMPVFWVRNSVHATHNGTQHGEVRLVSNLLNCEGFNKYLDKYTLYTTLEPCIMCAGMLSMVQIPKVVYAQKDLSCGNTQEIISTAKYPRYYKAFTVENGYKKDLEECFEQYKICKNDSITDFLVNDSAKEIFRKASNDLQDYKVKFKENRRVIKVAQEFLQNIQTKDNLDVLQCPKNM

SEQ ID NO: 120 - protein, 256 aa, synthetic construct
  REGION 1..256: note = pYY-BEM4.11; tr|A0A351C8C4|A0A351C8C4_9BACT polypeptide sequence
MNELTKQSEHLRNEALRIATRSYVPYTGQQEGVIILLENGDLIPGVRVENASFQLTIPALQNALSTMYALQRTDISMIVSSIPFTDSDLAYTGGMAEIAWEMVGASLLLVAGAHIPEAGTFIDPARGENLLDVSREAALNAFIPESDFPVGSAIQTSDDVVIDGCNVEHSDWSKIICAERNVLSTARSYGLGQITTIYVSCPKEPGGTPCGACRQVIVELAPDATVWMDRGNQEPIAMKATKLLPGHFTGNVLKKQ

SEQ ID NO: 121 - protein, 301 aa, synthetic construct
  REGION 1..301: note = pYY-BEM4.12; tr|A0A1G6V2K7|A0A1G6V2K7_PEPNI polypeptide sequence
MPIVRVNEIGARLPEDWEALETAIWQAYVSREDLPDAGELDLTLVDDATIQELNKTHRQLDKSTDVLSFPMYDDRDDLAADVQAGLPVILGDIMISVPTAERQAQAYGHSFKREMAYLLVHGLLHIAGYDHMSAEEKSAMRRAEEAILADVDVPRDTAPSKTAAVLDEADVQALIDAARAARLQAYAPYSGYAVGAALLAADGRRFCGVNVENASYGATCCAERTALFAAVTAGARDFIALALVTEGDEPAPPCGLCRQALAEFSPDLAIYLAGPTGETYRRTSLAALFPEAFSLSTKESV

SEQ ID NO: 122 - protein, 528 aa, synthetic construct
  REGION 1..528: note = pYY-BEM4.13; tr|F2NP91|F2NP91_MARHT polypeptide sequence
MPVMETHALEARFKEALARLCPEGRLLAAVSGGGDSVALLYLLKAAGRDTIVAHLDHALRPDSAADAAFVEKLAQRLGFPLETEHVDVRALAHRKRINLEAAAREVRYAFLARVARRWKARCILTAHTLDDNAETVLLQILRGAGRGLGIRPLQRRVARPLLEFSRAELRAYLEARGARWLEDPTNRSLELDRNYLRHAVLPRITARFPHALEALARFSQAQQADDWALEALSARHLIPDRRWPVPAYRALPLERAPEALRRRAIRGVLEALGVRPEARLVADVEAALGGRAQTLPGGVVVRRQRGTLFFIPPTVRFPKVQPPAGLEARPPRPGDYLVFPYGRKRLVDFLNERGVPRELKRRWPVGAVGAEVRWVYGLWPEPDEDRYMRRALVLARAAARQGEVPIGAVLVRDGAVLAEAANAVEASRDATAHAELLALRTALRRVGEKVLPGATLYVTLEPCPMCYGAILEARVARVVYGVENLKAGAFTVHGLEPRVALEAGRVEGECAKVLKDFFARLRPGRDGA

SEQ ID NO: 123 - protein, 226 aa, synthetic construct
  REGION 1..226: note = pYY-BEM4.14; tr|A0A316TX77|A0A316TX77_9BACT polypeptide sequence
MINGYTPYSGNQNTCYVKGESGTFYPGVRIENVSYPLTISSVQAAVCSCLANSDNPVEYYTGDHQPELLQVWADEYDMKPGGKLPDSPLKLFDPLVPSIPDIKKELDVLTEKSVTPNSGFPVSALLQTEKGYIRGVNIELSSWALGLCAERVAISRALTAGYTQFKSIHIYAPEADFVSPCGACRQVLLEVMPDADTELYHGDGTLSKHIVSDLLPFGFTSHKLKK

SEQ ID NO: 124 - protein, 321 aa, synthetic construct
  REGION 1..321: note = pYY-BEM4.15; tr|R6VYG3|R6VYG3_9FIRM polypeptide sequence
MIHKGTQTIETKRLILRAFTPDDAEAAFENWMSDPKVTEFLRWKTHADISDSRKIVNEWANGSADPEFYQWAIVPKDVNEPIGTISVVDRNDALGIFHIGYCIGSKWWHKGITSEAFSAVIHFLFEEVGANRIESQHDPENIHSGDVMKKCGLTFEGTLRQADFNNRGIVDACVYSILQSEWQNNTSVWQRLYNAALTVQNDRVVSPFIDAGGVAAALMTKKGNIYTGICIDTASTLGMCAERNAVANMLTNGESRIDKIVAVMPDGKVGAPCGACREYMMQLDRDSGDIEILLDLETEKTVRLKDLIPDWWGAERFGDTE

SEQ ID NO: 125 - protein, 229 aa, synthetic construct
  REGION 1..229: note = pYY-BEM4.16; tr|A0A3C1HZ18|A0A3C1HZ18_9BACI polypeptide sequence
MGDIMENWNELSEPWKRCFLQAWKAYCHGSIPIGAVLVDSEGEIFLEGRNRVHELTAPEGQLCDCRIAHAEMNVLVQVKTSDYEKLSGATIYSTMEPCIQCFGAIILSRIKNISFAAIDDKLAGATTLEDRHGFIKSRNLNIAGPFSHLGEIQIILRTDFLLRIFDSEYADPLIAAHEKDYPIGVALGRHYHRNNRLQVAKKETIPFGELFNEFSFDIKRAREGYTLGK

SEQ ID NO: 126 - protein, 205 aa, synthetic construct
  REGION 1..205: note = pYY-BEM4.17; tr|A0A1M6KV24|A0A1M6KV24_9BACT polypeptide sequence
MEASQQNILLKIEGKGPVAEINFTVTLPEWLVEQVQSGSTVFLTQKEKMRFVLELARKNVAQETGGPFAAAVFSLESGELVSAGVNVVVESRCSSAHAEVVALSLAQKAVDSHDLGAAGLPRMVLVSSAEPCAMCMGAIPWSGVKQVICGARDEDVRSVGFDEGAKPLEWVEDFAERGIEVIRDVLREEATEVLWDYRERGGEIY

SEQ ID NO: 127 - protein, 207 aa, synthetic construct
  REGION 1..207: note = pYY-BEM4.18; tr|A0A2U0T9B4|A0A2U0T9B4_9RHIZ polypeptide sequence
METAELISRLLDVIEKDIAPVTAKGVARGNKLFGAAILKKSDLAVIVAETNNEIENPLWHGEMQAIKRFFELPADQRPATRDCLFLATHEPCSLCLSGITWSGFDNFYYLFSHQDSRDGFAIPYDIQILKSVYAVPEPETGTVSPARDLYNRSNDFWTSHGLQDMIAGLARSNREALLARIDDLNALYAELSERYQRDKGGKGIPLP

SEQ ID NO: 128 - protein, 231 aa, synthetic construct
  REGION 1..231: note = pYY-BEM4.19; tr|A0A2K9PN08|A0A2K9PN08_9FLAO polypeptide sequence
MSDKKESKIKISKTSESIELDEIHSLLSYSIVQKFWENDDRNGRGYNVGVILVDENKNIVDWDINSVNKTENSTQHGEMRLISRYLDKDELYSLKGYTMYPTLEPCAMCAGMMTMTNVYRTVNGQMDYFYSKALERLSIDTRECGGYPPYPRTVISEISPSSISTRLDAEYKQYTNAGNKPIITKFLSTYKAKTIYDDAFNQFINFKCKFPENKTKYENAIKFYNSLPESI

SEQ ID NO: 129 - protein, 330 aa, synthetic construct
  REGION 1..330: note = pYY-BEM4.20; tr|F4PWM7|F4PWM7_CAVFA polypeptide sequence
MRFSLSLLFVILSVLLAGVLACKDPYNPETVDYGQCASATKANYEVRSDSKVLTPADLPADELAVHESRMRHIIDIARVNNKKFVSSIYFPNGTLACIGINTGKPNMIAHGEIVAIQNCTEIHGISMYTNYSIYTTGEPCSMCASAILWSRFKTVVWSTYNSDLYCKICMSNIPIDSSYIFSRAYGLGIEAPVAIGGVVKAEGDAWFGTYCNRPTSIYYIAPKCACQDPAKVSPLKFTQTRTTVWVEGGDKVVTQWNAIISNPSNSTIVDPPIVISPSVVFKGAPWGISAASEPNTYKLSYNKVLFPGQTFSFGYSVYGLEEVAFTALEA

SEQ ID NO: 130 - protein, 193 aa, synthetic construct
  REGION 1..193: note = pYY-BEM4.21; tr|U7QZM1|U7QZM1_PHOTE polypeptide sequence
MNKTRRKLLATLGIMSISMSFIAQAGEKKTQVINNILSKQEITEHEKYMREAIKEAIKNPKHPFGAVIVNRNNGEILSRGVNTGRNNPILHGEIQAINHYITQYGNQGWENVALYTTGEPCSMCMSALVWIGIREVIWATSISVIRNSGIRQIDISAHEIAERASSFYNPITLVGGILANETDKLFLERKRGN

SEQ ID NO: 131 - protein, 319 aa, synthetic construct
  REGION 1..319: note = pYY-BEM4.22; tr|A0A081CH48|A0A081CH48_PSEA2 polypeptide sequence
MASRRHLLATQVTGNHRKLSLWHLRGWLSPYTKLVDAVYFLTTNSFYHSLQTPPVQSITMLLSSIITSLALAAQASAYREGLHPEFQSGLSINSVPATDRDHWMRLANSAIYYPPVSHPCPQAPFGTAIVNTTSNELICAIANRVGSTGDPTQHGEITAIQHCTNVMRKKGLSPQEIIAAWKQLSLYTNAEPCTMCLSAIRWAGFKEVIYGTSVGTISENGRNQIYIPSNLVLEKSYSFGHATLMLGNILTHETDPFFQHQFNESAPCPVGCERTQVGEARVKTCEPVPNWQKLVRLEYSEDSRVGSEPVAHTPLHLEL

SEQ ID NO: 132 - protein, 203 aa, synthetic construct
  REGION 1..203: note = pYY-BEM4.23; tr|A0A3D3HMU1|A0A3D3HMU1_9GAMM polypeptide sequence
MDYSDAILGAITSIRRNSKQPGVNVTDNVTDSSTQYNNDEYWMRRALALAREAGEAGEIPVGAVLVKDNQQVAGGFNQPIRSHDPAAHAEILTLREAGAVLGNYRLIDTTLYVTLEPCMMCAGALVHSRIKRLVFGAAEPKTGAAGSFIDLLTLPRLNHYMEVTGGVLGEECSVLLSDFFRRRRAEKKALKRQNSESGSDSAS

SEQ ID NO: 133 - protein, 270 aa, synthetic construct
  REGION 1..270: note = pYY-BEM4.24; tr|A0A1N5WT13|A0A1N5WT13_9ACTN polypeptide sequence
MLEKIERRLVAAAEAVVRSPSTGDAHTVAAAAMDANGDIYSGVNVFHFTGGPCAELVVIGSAAAANAPPLITIVAVGDGDRGVIAPCGRCRQVMLDLHPDVFVIVPTGDGQLAAKPVRELLPFGYVARTGSTAPRVVYFHPRHYDTISSGLKTATVRFQDSVQTGPAVFVFDDGESIRRLDAVVEKVESRRLDHLTEEDAHHEALPDSDALRDAIKTQYPMLGDGDVVDVATFRLTAISAPDPDPRSSYPPAVSRCNPAGPRADLLVGQS

SEQ ID NO: 134 - protein, 257 aa, synthetic construct
  REGION 1..257: note = pYY-BEM4.25; tr|X0SAC5|X0SAC5_9ZZZZ polypeptide sequence
MTKDGRVIASAHDTEVTDQDSTAHAEINAIRKASKIYRKDLTGCLIISTHEPCPMCTGSIIWSNISKVVYGVSIRDSIKAGRDMINLSCKEIIKKPNAEINIYDGILKKECLKLYNNDTRKLVKKFRKYEWINIEENLLNKRMQWFENNKTMIRKLKGNDLEKAYHLILMKIGIKRSEAPIVKKSESKIIFHSKNYCPSLEACIILDLDTREVCKEIYERPTEELIRRLNSKLRFTRNYDCIRPYSDYCEEIIILEK

SEQ ID NO: 135 - protein, 154 aa, synthetic construct
  REGION 1..154: note = pYY-BEM4.26; tr|A0A3B8IC10|A0A3B8IC10_9BACT polypeptide sequence
MPSHEDFIHQCLELGKEALLQGNPPVGSVIVWQDQVIGRGIENGRSSGDITQHAELLALQEAVATGQRDKLKEAIIYSTHEPCVMCAYPIRQYKIPTVVYSVAVPELGGHTSSWHLLTTEDVPKWGKAPKIITGISAEEVEALNAAFQDSLKKG

SEQ ID NO: 136 - protein, 180 aa, synthetic construct
  REGION 1..180: note = pYY-BEM4.27; tr|A0A2N9P8B9|A0A2N9P8B9_9FLAO polypeptide sequence
MFIFKLISPPVSIEVYQDKIIQKLYICFMENIFTDEYFMKKALQEAETAFQQGEIPVGAVIVIDNRIIARSHNLTEMLNDVTAHAEMQAITASANFLGGKYLKDCTLYVTLEPCQMCAGALYWSQISKIVYGATDEQRGYRAMGAQLHPKTKVISGIMQNECTHLMKDFFKQRRSKSTKD

SEQ ID NO: 137 - protein, 178 aa, synthetic construct
  REGION 1..178: note = pYY-BEM4.28; tr|K1KX30|K1KX30_9BACT polypeptide sequence
MVKNPVNNNELYFGKHSEIPMNEEQKAYMKMAVDLSRSGMESGKGGPFGCVIVKDGKVIGIGSNSVLETNDPTAHAEIVAIRDACRNLGHFQLDGCEVYTSCEPCPMCLGAIYWARPSKVFFANDKRDAAEAGFDDDFIYQELELPYEKRKIPFEQGMQDTAKEVFQEWILKEDKTLY

SEQ ID NO: 138 - protein, 196 aa, synthetic construct
  REGION 1..196: note = pYY-BEM4.29; tr|R4XI84|R4XI84_TAPDE polypeptide sequence
MSSEIEPPSTDVHKHAVAEAADESGAADAFMQIALQQAETALLNKEVPVGCVFVHQPTGTVLATGANQTNASLNGTLHAEFVAIESILRDHPPSIFRESDLYVTVEPCVMCASALRQLQVRKVYFGCGNDRFGGCGSVFSIHSDASKTGDAAYMVESGIFRKEAIMLLRRFYLLQNESAPKPALKSTRVLKEHFDE

SEQ ID NO: 139 - protein, 212 aa, synthetic construct
  REGION 1..212: note = pYY-BEM4.30; tr|A0A239CVF7|A0A239CVF7_9DELT polypeptide sequence
MSPASKKHFPSLFSFLLLTIGLICGTAHAQPQGHTADDTAATLANASLKEHEPFIRRCYQLAIDAGKKGNHPFGALLVHKGKIVLEAENTVLTDNDFTNHAEMNLIAEAARTLSRQIIPEATVYTSCAPCAMCTATLAMAGFTRIVYGVSHDALNKRFGLKGKSVSCPALFKTMGMELEFVGPVLEKEGLRVFDFWPEKDPHAQMLKKQARK

SEQ ID NO: 140 - protein, 320 aa, synthetic construct
  REGION 1..320: note = pYY-BEM4.31; tr|A0A1Q3NME1|A0A1Q3NME1_9BACT polypeptide sequence
MTEFNYDWAKLAFSSKRPLTNLKATFIIAPREISEKRFTQLLKEYLPKGDILLGISKEDYVEGLEGQPQFAMLQQKTLQKLIDKVNDASAHKVYTLRYFQRELPAIIEKLTPPRVVGIHGSWHHSFHTLPIYYLLSEKRIPYQLVAAFSDEDEARAYEVATDKKIVRPTLEGSFDDTTVLQLTDEVAKSSYDYGFQTGAILAEKVNGVYQPVAAGFNKVVPYQTYALLNGASRETNFSPANDMNHYDTIHAEMQILVEAAKQGISLKDKTLFVNLMPCPSCARTLSQTELSEIVYRIDHSGGYAVDLLTKVGKDIRRIVY

SEQ ID NO: 141 - protein, 180 aa, synthetic construct
  REGION 1..180: note = pYY-BEM4.32; tr|A0A2G6N4N7|A0A2G6N4N7_9DELT polypeptide sequence
MKERTVSYSDRHFMAEALEMAESALTQGEFPVGCVIADGTAVVARGHRTGTTAGAVNEIDHAEINALRHLGLAGEHLDRTDLTIYSTMEPCLMCFAAIVLSGINRIVYAYEDVMGGGTGCDLTGLPPLYRDAPLTLVAGVRRRASLNLFRRFFTDPENGYWAGSLLSRYTLNQTKDSHRL

SEQ ID NO: 142 - protein, 156 aa, synthetic construct
  REGION 1..156: note = pYY-BEM4.33; tr|A0A0G0RBB8|A0A0G0RBB8_9BACT polypeptide sequence
MQSVQYNKLTHLQRRALDEAEQVLENSYNPYSHFYVGACLISEDEQLIAGTNFENAAYGSAICAERAAVLRANAMSIRRFRGIAIIARGEDFNTTEVTGPCGSCRQVLYEISQVSGCDLQVILATSKKDKIVITTIRELLPLAFGPLDLGVDIGKY

SEQ ID NO: 143 - protein, 217 aa, synthetic construct
  REGION 1..217: note = pYY-BEM4.34; tr|A0A327L2Q5|A0A327L2Q5_9RHIZ polypeptide sequence
MVTSRDGEDEAMMARCVALSRIAVGKGEYPFGAVVAREGRIVAEAINRTIRDGDVSRHAEVIALARAQKAIGRRELRECSLYSNVEPCAMCSYCIREAWVGRVVYALGSPVMGGVSKWNILRDDGLSGRMPQVFDAAPEVVSGVLVEQAQAAWRDWSPLAWEMITLRGLMTDPSARPECRTRAARPRSLWHHLVALIERPPRPYVDPTSAAEGHADL

SEQ ID NO: 144 - protein, 162 aa, synthetic construct
  REGION 1..162: note = pYY-BEM4.35; tr|S2DR30|S2DR30_9BACT polypeptide sequence
MKMKKKIEITVSLEVIQKSEWSKEDRSLIERAIHAVEHAHAPYSNFMVGTALLLDNGQIFSANNQENVSFPVGICAERAVLSYAMGNFPNNRPVKLAVVAKRRSDSTWATVTPCGLCRQTINEYEVKFGHPIEILMLNPGEEILKASGIDQLLPFRFNDLNS

SEQ ID NO: 145 - protein, 153 aa, synthetic construct
  REGION 1..153: note = pYY-BEM4.36; tr|A0A369QGF1|A0A369QGF1_9BACT polypeptide sequence
MEEHEKWMHWCLNLAQQALQQGDFPVGAVVVQKGKLIGQGVEAGQLKKDITCHAEMEAIRDARQTINTADLQNCILYSTHEPCIMCSYVIRHHKISRVVVGTTVPEVGGSSSAYPLLSAPDISIWVAPPHLVTGVLAEACQALSQAYKQKFKK

SEQ ID NO: 146 - protein, 159 aa, synthetic construct
  REGION 1..159: note = pYY-BEM4.37; tr|A0A1W6X4U4|A0A1W6X4U4_9RHIZ polypeptide sequence
MTNPSRQERWDRRFLELAKVFGTWSKDRSAGTGCVIVGPDRLLRASGYNGFARGIDDEVPERHERPAKYSWTEHAERNAIYNAAKLGISLDGCTAYVNWFPCIDCARAIVQAGIVRLVGLHPDHADQRWGSEFKFATEMLRESGIEIILYDIPELAARK

SEQ ID NO: 147 - protein, 490 aa, synthetic construct
  REGION 1..490: note = pYY-BEM4.38; tr|A0A238BW09|A0A238BW09_9BILA polypeptide sequence
MEEMARKIRTKAKKANSYCNTMTFLISKASIVLLKAECKRIELTVVIFRFLIKMNASEPNNELCDMTVIKSMLKITHVIFDLDGLLIDTEVVFSKVNQCLLSKYNKKFTPHLRGLVTGMPKKAAVTYILEHEKLSAKVDVDEYCKKYDEMAEEMLPKCSLMPGVMKLVRHLKTHSIPMAICTGATKKEFEIKTRYHKELLDLISLRVLSGDDPAVKRGKPAPDPFLVTMDRFKQKPEKAENVLVFEDAANGVCAAIAAGMNVIMVPDLTYMKIPEGLQNKINSFSDNLIISNDLNVALMSLKKELSEEEVHFLNRAFEIAVDAVLNNEVPVGCVFVFEGQEVAFGRNDVNRTKNPTYHAEMVALKMMKQWCMDNGRDLEEIMRRTTLYVTLEPCIMCASALYHLRLKKILYGAANERFGGLVSVGTREKYGAKHFIEIMPNLSVDRAVKLLKEFYEKQNPFCPEEKRKVKKPKKSGNNNDNSDDAVALNV

SEQ ID NO: 148 - protein, 159 aa, synthetic construct
  REGION 1..159: note = pYY-BEM4.39; tr|A0A1J5H6Z0|A0A1J5H6Z0_9BACT polypeptide sequence
MAYQPSEKFMQMAIDKTREGVLSGQTPFGACIVKDGKVVACEHNTVWQDTDITSHGEVHTIRAACKAIGSIDLSGCILYSTCEPCPMCFSAIHWARIDTVVYGAFIADAQDAGFNELTISNEKMKEFGGSPVNFISGFMRDENVALFKLWKEQGANNVY

SEQ ID NO: 149 - protein, 168 aa, synthetic construct
  REGION 1..168: note = pYY-BEM4.40; tr|A0A3C2D945|A0A3C2D945_9BACT polypeptide sequence
MKTTEIRIIVHEYQNIDELTENDQYLLHEARRITEFAYAPYSGFHVGAAILLGNGMIVKGNNQENSAYPSGLCAERVALFYANANYPDSEVKTIAISAAKNGILVNDPIKPCGGCRQTLSEAEVRFGSPIRIILDGQDSILVLHGVESLLPLSFSKKDLASPLAATGR

SEQ ID NO: 150 - protein, 214 aa, synthetic construct
  REGION 1..214: note = pYY-BEM4.41; tr|A0A1I7EYS3|A0A1I7EYS3_9BURK polypeptide sequence
MKFKLDPSRPPDEDDYYLGVALAVRRKANCTGNRVAAVIVKNKRVIATGYNGVPEDMPNCLDGGCLRCSNPGGQFKSGTRYDLCICVHAEQNALLTAARFGISVEGAHLYTTMQPCFGCAKEILQAKIEKVFYLHPWVPTDVDPVMDAAMKAEYAKIIGKLKVKKLDFDDPVATWAVTTMRQAALASDKNPDKKTPPKTAKKKVAKKKSRTSPR

SEQ ID NO: 151 - protein, 155 aa, synthetic construct
  REGION 1..155: note = pYY-BEM4.42; tr|H8GQX8|H8GQX8_METAL polypeptide sequence
MNHEHFMRRAIELARQAPQYPFGAVIVRRDDGQCVGQGFNRSDLNPTYHGEMVAINDCAVRHCAEDWRGFDLYTTAEPCAMCQGAIEWAGIGRVFYGTSIPYLQKLGWWQIDLRAAEVSARAVFRDTLIVGGILETECNALFAAARRGCFGTGSE

SEQ ID NO: 152 - protein, 156 aa, synthetic construct
  REGION 1..156: note = pYY-BEM4.43; tr|A0A0S8HZN3|A0A0S8HZN3_9CHLR polypeptide sequence
MDEHDIRFLRASFDVARNARKNGNHPFGALLVDEHGRIVMEAENTVITAKDCTGHAETNLMREASSKYDSDFLANCTIYTSTEPCPMCAGAIFWSNVRRVVYGLSEESLYEIAGRGSEEVLFLSCREIFERGKKLIEVIGPLLEDEAREVHMGFWR

SEQ ID NO: 153 - protein, 193 aa, synthetic construct
  REGION 1..193: note = pYY-BEM4.44; tr|E3SF31|E3SF31_9CAUD polypeptide sequence
MKPTTVLQIAYLVSQESKCCSWKVGAVIEKNGRIISTGYNGSPAGGVNCCEHAEEQGWLLNKPKPVLIPGHKSECVRFSQVDRFVLAKAHREAHSAWSKNNEIHAELNAILFAARMGSSIEGATMYVTLSPCPDCAKAISQSGIKKLVYCETYDKNIPGWDDILKNAGIEVFNVPKRSLDKLNWENINEFCGE

SEQ ID NO: 154 - protein, 330 aa, synthetic construct
  REGION 1..330: note = pYY-BEM4.45; tr|F8AAC6|F8AAC6_THEID polypeptide sequence
MIRAPWHEYFMLLAKIVALRSGCNSRPSGAVIVKNKRILATGYNGPMPGAWHCTDRGPGYCFRREKGIPDIDKYNFCRATHAEANAIAQAARFGISVEGASLYCTLAPCYVCLKLIASAGIKKVYYEHDYGSRDFERDQFWKEAIKEAGLEKFEQITVSQEVMEQLQEILPYPTSKRRLAPTEFLDEFEDGKKYGVPSIEVLFNKLNYLTRQALKDITFVIEKTTVTEEPEGISFYLSGKMVELSELINTVKKQINADQNFYFLAKHNAIEAKIEILREAENIRLKAFLNECPLESFKRIAESLDYILYQVSNSLSLPTRLELSVNLLRI

SEQ ID NO: 155 - protein, 158 aa, synthetic construct
  REGION 1..158: note = pYY-BEM4.46; tr|A0A2H4ZNK4|A0A2H4ZNK4_9EUKA polypeptide sequence
MKKQLSRKIQEEWMSRLLRNAYDAGTYGEVPIAAVILNESGQCIGWGRNCREKDQNPLGHAEIIALRQASYLKKSWRFNECTMLVTLEPCPMCAGALLQARINHIIYGASDYKRGGFGGVLDLSKNSSAHHKIEITRGVKSIQSCQLLETWFRRRRRV

SEQ ID NO: 156 - protein, 176 aa, synthetic construct
  REGION 1..176: note = pYY-BEM4.47; tr|A0A239N5N1|A0A239N5N1_9PSED polypeptide sequence
MEGRAGIIPFDEGGAAMGPAEEDSPMQHLAYMREALALARANVEAGGRPFGAVLVRDGEVIARAANGTHLDHDPTAHAELLALRAAGRALGSPRLDGCVVYASGHPCPMCLAAMHLSGVSAAYYAYSNADGEPYGLSTAAVYAQMAQPVEWQSLPLQALRPEDEEGLYGFWRERRP

SEQ ID NO: 157 - protein, 199 aa, synthetic construct
  REGION 1..199: note = pYY-BEM4.48; tr|A0A328VTR2|A0A328VTR2_9PSED polypeptide sequence
MHPEHLALLQQAPASTHADDTWARLCCEQALLAVEEGCYAVGALLVDGAGELLCSGRNQVFAPAYASAAHAEMRVLDQLEAEHAQVDRRSLTLYVSLEPCLMCYGRILLAGITRVRYLARDRDGGFALRHGRLPPAWANLASGLSVVQAKADPYWLDLAEHAIGRLQDRQTLRQRVIRAWRGQRTLTDEFSSTKRTHSG

SEQ ID NO: 158 - protein, 402 aa, synthetic construct
  REGION 1..402: note = pYY-BEM4.49; tr|A0A103YG48|A0A103YG48_CYNCS polypeptide sequence
YIRELHASSLRRDEHEIQNPKILVIVDRLSSPSLHVSLSLSLSLVIFPPFIPLNQTPTHMENAKVVEAKDGTIAVASAFSGHQEVVQDRDHKFLTRAVEEAYKGVECGDGGPFGAVVVHKDEVVASCHNMVLKHTDPTAHAEVTAIREACKKLNKIELSDCEIYASCEPCPMCFGAIHLSRIKRLIYGAKAEAAIAIGFDDFIADALRGTGFYQKAHLEIKQADGNGAMIAEQVFEKTKAKFAIDHKFLTRAVEEAYKGVECGDGRPFGALVVHKDEVVVSCHNMVLNYTDPTAHAEITAIREACKKLNRIELSDCEMYSSCEPCPMCFGAIQISRIKRLVYGAKAEASIASGIPIGDFISDALKGTGFHEKANFEIKQADGNGAMIAEQVFERTKAMFPKR

SEQ ID NO: 159 - protein, 195 aa, synthetic construct
  REGION 1..195: note = pYY-BEM4.50; tr|W5M1M8|W5M1M8_LEPOC polypeptide sequence
NSSTRESRVMAQMEINGGASPPKKPGKGQSAADQDMITGLINKALQAKEFAYCPYSNFRVGAALMTNDGRVFTGCNVENACYNLGVCAERTAILKAVSEGYESFRAIAVSSDLQDQFISPCGACRQVMREFGTGWDVFLTKVDGSYVRMTVDELLPMSFGPDDLKKKKVFSLQNGHEVSTQFYTHSPCEAGENNN

SEQ ID NO: 160 - protein, 134 aa, synthetic construct
  REGION 1..134: note = pYY-BEM4.51; tr|A0A3N5YPZ2|A0A3N5YPZ2_9ALTE polypeptide sequence
MSNSETEHIQALVDAAQAAQKQSYSPYSSFQVGAAIFADDGNTYSGCNIENVAYPLGQCAEATAIGMMIMQGAKRIEDIMIASPNDQVCPPCGGCRQKISEFGTAETKIHMVTRSGEVSTVTLGELLPLAFDSL

SEQ ID NO: 161 - protein, 162 aa, synthetic construct
  REGION 1..162: note = pYY-BEM4.52; tr|A0A2A9NC86|A0A2A9NC86_9AGAR polypeptide sequence
MTNSTLSNEDRTRLIQGAFQARKKTYSPYSNFPVGAALLTTDGRIIEGANIENASYGGTICAERTAIVKAVSDGYRHFAGIAVTTKMPTRVSPCGICRQVLREFCSLDMPVLLVPGDYPQRNPVDDDGADKPGVITEGGVRETTLGALLPDSFGPENLPPRA

SEQ ID NO: 162 - protein, 163 aa, synthetic construct
  REGION 1..163: note = pYY-BEM4.53; tr|A0A2D6RD43|A0A2D6RD43_9GAMM polypeptide sequence
MNIENLITENDETLIRRCIELAGESVKNGDKPFGALLAKDGNIIFESSNNAKTKVPYHAEILTLMDAQDKLNTTDLSDYALYSNCEPCPMCSFMIREYKLDKVVFSVHSPYMGGQSRWNILEDDVLTRFKPYFSKPPNVVGGVLESEGKRIFDKVGLWMFGKE

SEQ ID NO: 163 - protein, 204 aa, synthetic construct
  REGION 1..204: note = pYY-BEM4.54; tr|A0A0H3AVL6|A0A0H3AVL6_BRUO2 polypeptide sequence
MHAKGYSQQERRIIPFANRFRFRELCSNKSLHGLRAKFPEQYTKWDPMRKAASITKANSATPMDIALEEAHAAGERGEVPIGAVIVRDGEIIARAGNRTREFNDVTAHAEILTIRQAGEMLGSERLIDCDLYVTLEPCAMCAAAISFARIRRLYYGASDPKGGGIEHGGRFYTQPTCHHAPEIYPGFCEADARKILKDFFREKR

SEQ ID NO: 164 - protein, 165 aa, synthetic construct
  REGION 1..165: note = pYY-BEM4.55; tr|A0A242H531|A0A242H531_9ENTE polypeptide sequence
MFIVKNNIEVIQQQAELDAKFMKQALKLAKDASNNGNEPFGAVLVKNDKVILTGENQIHTESDPTYHAELGIIRDFCTSQKITDLSEYTLYTSCEPCCMCAGAMVWSNLDRMVYGLGHDELAEIAGFNIMIGSEEIFSKSPNRPEVAKGVLKEAAVPVYVDYFQR

SEQ ID NO: 165 - protein, 181 aa, synthetic construct
  REGION 1..181: note = pYY-BEM4.56; tr|A0A2R6XZE2|A0A2R6XZE2_9BACL polypeptide sequence
MSGRISWHEYFMAQAKLIALRATCTRLMVGAVIVRDRRVIAGGYNGSIAGDEHCIDVGCKVRDGHCIRTIHAEQNALMQCAKFGVSTDGAELYVTHFPCLNCTKLLIQAGIRHIYYEVPYRVDPYAIELLEKAGVGTTQITVDLNAYVQVMSKVSTDPALTYVPESKAQKDEYGQSVGKIV

SEQ ID NO: 166 - protein, 173 aa, synthetic construct
  REGION 1..173: note = pYY-BEM4.57; tr|A0A139SHT6|A0A139SHT6_9BACT polypeptide sequence
MSEANASSESLPSRNSPVELIAEAAGKFGRRPTWDEYFMATAVLISTRSSCERLNVGCVIVTAGESHKNRIVAAGYNGHLPGSPHTSRMRDGHEQATVHAEQNAISDAARRGSSVEGCTAYVTHYPCINCAKILASAGIAKICYRLDYHNDPLVKPMLAEAGIEIVQLGEAAS

SEQ ID NO: 167 - protein, 170 aa, synthetic construct
  REGION 1..170: note = pYY-BEM4.58; tr|A0A261DBH2|A0A261DBH2_9RICK polypeptide sequence
MVMKKKLITVKRSTEFNNFFMEEALKQAQFALDKNEIPVGAIIVNRITNKVIAKAHNIVEQTKNPVLHAEIVAINQSCQILSSKNLSDCDMYVTLEPCVMCSGAISFARIGRLFYAANDPKQGAIENGGRFFNSKSCFYRPEIYSGFSAKISENLIKEFFYNVRYQKCNP

SEQ ID NO: 168 - protein, 146 aa, synthetic construct
  REGION 1..146: note = pYY-BEM4.59; tr|A0A2N0XZK6|A0A2N0XZK6_9VIBR polypeptide sequence
MTDNSLHESYMRQAFELSKSALPGCRPNPPVGCVFVKDGEVVSSGFSQPPGNHHAEAGAIAAYTGSYDGLVAYVTLEPCSFQGRTPSCAKALVRVRPEKVYVAILDPDTRNSGAGIKILEDAGIDVEVGLLGEEVASFLNPYLIRN

SEQ ID NO: 169 - protein, 159 aa, synthetic construct
  REGION 1..159: note = pYY-BEM4.60; tr|A0A1V5R0F9|A0A1V5R0F9_9BACT polypeptide sequence
MTKKETTKLHALDDFCMKKALLLAKRAFRADEVPVGALVVDSSNKVIGRGYNQVEKRKSQRAHAEQLAIEQACKKIGDWRLEGCTLYVTLEPCTMCMGLIKLSRIERVVFGAASPLFGYQLDKNRKSQLYKKGVIKIRKGVGKATAAALLKDFFKNKRM

SEQ ID NO: 170 - protein, 167 aa, synthetic construct
  REGION 1..167: note = pYY-BEM4.61; tr|A0A2W0H8Y3|A0A2W0H8Y3_9BACI polypeptide sequence
MKNNGRLDHEYFMTEALQEAKEAGQRGDLPIGAVIVHNGRIIARGSNMRKTAGIKISHAENNAMHNCAPYLMKHASECVIYTTLEPCIMCLTTLVMANIDSIVFAADDKYMNMKPFIDANSYIRDRIHQYKGGVCRGESEALLRKYSPYAAELALNGTHPHHRKGGA

SEQ ID NO: 171 - protein, 165 aa, synthetic construct
  REGION 1..165: note = pYY-BEM4.62; tr|A0A261BDB7|A0A261BDB7_CAERE polypeptide sequence
LYKLYIFRMTTTKANLTQFEQELVDKAVGAMEKAYCKYSGFKVGAALVCEDGEIIIGANHENASYGATICAERSAMVTALTKGHRKFKLLAVATELEAPCSPCGICRQYLIEFGDYKVILGSSTSDQIIETTTYGLLPYAFTPKSLDDHEKEAEERNHQEGEKKH

SEQ ID NO: 172 - protein, 162 aa, synthetic construct
  REGION 1..162: note = pYY-BEM4.63; tr|A0A2E1PHI6|A0A2E1PHI6_9GAMM polypeptide sequence
MKELLIHSWLMLNSNSKLIMERVIELSEINLKNGKIPIAAVIVDKKNYEIISESQNEDSPIGHAELLAITKALKKLNTNRLDSTNLFVTIEPCPMCAYAISKCHINRLYFGSEDEKGGGVINGPRIFESHNLKKIDYVSHCYHEKTTQLMQSFFQLKRNQQL

SEQ ID NO: 173 - protein, 133 aa, synthetic construct
  REGION 1..133: note = pYY-BEM4.64; tr|A0A378LUA7|A0A378LUA7_9GAMM polypeptide sequence
MDTIIKKMISNAHNTLAHSYSPYSKFSVASCICTDKDNFYTGVNVENSAYGLAICAETSAISAMVTAGEKRIKSMVVMAGTNILCSPCGACRQRIYEFSTPDTLIHLCDKNSILRTFKINELLPEAFKFDFNP

SEQ ID NO: 174 - protein, 370 aa, synthetic construct
  REGION 1..370: note = pYY-BEM4.65; tr|A0A139HQ78|A0A139HQ78_9PEZI polypeptide sequence
MADSLKSKPGHARHDTALIHGLSQSDVQKLSESCVDAKSKAYCPYSHFRVGCAVLLANGDVVQGANVENAAYPVGTCAERVALGTAVGAKKGDFRALAVSTDISPPASPCGMCRQFIREFCELNTPILMYDKDGKSVVMTLEQLLPMSFGPDKLLPPGQLENGLMQTQTQSSFVTRAFSTTSSRRQDDTPQVPQSHYDFFPQTFPQGPPPKTSFSPDLKQLRKEFLQLQAKAHPDLAPQDQKRRAEALSMRINEAYKTLQSPLRRAQYLLSQQGIDVEDETAKLDDSSLLMEVMEAREAVEEVEDEEQLNEIRAENNGRIEESVRVLEDAFRDNEFEKAAQEAIRLRYWVNIEESIQGWEKGNGGGILHH

SEQ ID NO: 175 - protein, 165 aa, synthetic construct
  REGION 1..165: note = pYY-BEM4.66; tr|A0A2A9FXV0|A0A2A9FXV0_9VIBR polypeptide sequence
MCNLKENKDMDKYFHFACDATIEGMREGTGGPFGATLTRNGEVVCSVANTVLKDMDISGHAEMVAVREACKKLDTLDLSDCVMYATCEPCPMCVSVMLWAGIKTCYYASTHLDAAKHGFSDQQLRDYLDGSDTSTLNMVHIEDNRDDCAKIWTEFRHLNETKNDG

SEQ ID NO: 176 - protein, 509 aa, synthetic construct
  REGION 1..509: note = pYY-BEM4.67; tr|A0A1A8AG96|A0A1A8AG96_NOTFU polypeptide sequence
MEHSDRWSRAEPGLSTSSRETRDGSTQTDCKLQGHGPRLSKVNLFTLLSLWMELFPQEQDEENGQSQIRRSGLVVVREGKVVGLHCSGADLHAGQAAILQHGASLANCQLFFSRRPCATCLKMIINAGVRQITFWPGDPEISMLTSNQTHSQRTSQSITEASLDATAVEKLKSNSRPQICVLMQPLAPGVLQFVDETSRRSDFMERMMDDDPELDSEKLFNSDRLRHLKDFCRHFLIQTDQRHKDILSQMGLKNFCVEPYFSNLRSNMTELVEVLAAVAAGMPQQHYGFYREESLSLDPHPVDVSQAVARHCIVQARLLSYRTEDPKVGVGAVIWAKGQSACCCGTGRLYLIGCGYNAYPAGSKYAEYPQMDNKQEDRERRKYRYIVHAEQNALTFRTRDIKPDECSMLFVTKCPCDECIPLIRGAGVKHIYTSDQDRDKDKGDISYLRFGSLKGVCKFIWQRSPPVSSASSLHLTNGCVGKHVRQAEQQIYKNKKLCTKGSSGSSDIC

SEQ ID NO: 177 - protein, 148 aa, synthetic construct
  REGION 1..148: note = pYY-BEM4.68; tr|A0A3E2VN88|A0A3E2VN88_9FIRM polypeptide sequence
MEKEITNMDKQKLIQMAVDGLGRSYAPYSHFHVSAALLCADGTVYTGNNIENAAYTPSVCAERCAIFKAVGDGRREFEAIAVCGGPDGVIEDYCPPCGVCRQVMREFCDPSSFRVLVAKTAEDYREYTLEQLLPDGFGPDHLTGSGER

SEQ ID NO: 178 - protein, 221 aa, synthetic construct
  REGION 1..221: note = pYY-BEM4.69; tr|A0A2D5ZRJ2|A0A2D5ZRJ2_9BACT polypeptide sequence
MARPVHLHTGERRTEEGATESRAVAAVATAITRAPRAPPRPATGRERDGPPPRRVFGGGLRVGDPSGYDRGESKPIGGPLTEKRSDWHSYFMRIAGEVATRATCDRKHVGAVIVRNRTILSTGYNGSIRGMPHCDDVGHDMVDGHCIATIHAEANAILQAARNGVMIQDGSIYITASPCWNCFKLVANAGLKRVYYGEFYRDKRSFEVARRLGIDLMHIEV

SEQ ID NO: 179 - protein, 155 aa, synthetic construct
  REGION 1..155: note = pYY-BEM4.70; tr|A0A1B8WPS3|A0A1B8WPS3_9BACI polypeptide sequence
MEGVQLIYQFQWGNLIMTVNKEDLYLIDVARNTIKTLYVDGKHHVGAAVRTKTGKIYSAVHLEANIGRVSVCAEAIALGKAISEGESEFDTIVAVRHPDPTQENQKIEVVSPCGICRELISDYGKGTNVILKNKEGYIKTVISDLLPNKYIREDN

SEQ ID NO: 180 - protein, 156 aa, synthetic construct
  REGION 1..156: note = pYY-BEM4.71; tr|A0A1W5ZQK9|A0A1W5ZQK9_9BACI polypeptide sequence
MNRFMERAVSLAAENVRVGGQPFGAVLVKDDELVAEGVNEMHLNYDVSGHAELLAIRRAQGELQTHDLSGYTMYASGEPCPMCLSAMYFAGIKDVFYCATVEEAAQVGLEKSKNVYDDLQKSKGERSLVMKQMPLEDDQEDPMKLWDERTNHNGTS

SEQ ID NO: 181 - protein, 340 aa, synthetic construct
  REGION 1..340: note = pYY-BEM4.72; tr|A0A378V0W4|A0A378V0W4_MYCFO polypeptide sequence
MVHAQFDPTARQALAATAVEAKTRKDLTWQQIADAAELSPAFVTAAVLGQHALPARSAEAVAALLGLDDDAALLLQTIPIRGSIPGGIPTDPTIYRFYEMLQVYGTTLKALVHEQFGDGIISAINFKLDVRKVADPEGGERAVITLDGKYLPPNPFDRVRYRGGLMDFAQRTIDIARQNVAEGGRPFATVIVKNGEILAESPNLVAQTHDPTAHAEILAIRKACTRIGTEHLIGATIYVLAQPCPMCLGSLYYCSPDEVVFLTTRDAYEPHYVDDRKYFELNMFYDEFAKPWDQRRLPMRYEPRDAAVDVYKLWQERNGGERRVPGAPTSTRPGKNPRGE

SEQ ID NO: 182 - protein, 157 aa, synthetic construct
  REGION 1..157: note = pYY-BEM4.73; tr|I3XF03|I3XF03_RHIFR polypeptide sequence
MKQRCMSPKSAQRFWDNDMHNNKDRPMSENELFVAAREAMAKAHAPYSKFPVGAAIRAEDGQIYTGANIENLSFPEGWCAETTAISHMVMAGQRKIMEVAVIAEKLALCPPCGGCRQRLAEFSGASTRIYLCDETGIKKSLALSDLLPHSFETEILG

SEQ ID NO: 183 - protein, 595 aa, synthetic construct
  REGION 1..595: note = pYY-BEM4.74; tr|F8IEF3|F8IEF3_ALIAT polypeptide sequence
MDAKELETRGWLCMRAVDVIDKKRRGEALAEEELRFLIEGYVAGRIPDYQMSAFLMAVVWRGMTREETLVLTRLLADSGERLDLSGIPGVKVDKHSTGGVGDKATLVVLPLVASIGVPVIKMSGRGLGHTGGTIDKLESIPGFRTDLSVAELVAQVRQVGIALGGQTADLAPADKKLYALRDVTGTVESLPLIASSVMSKKLAGGADAIVLDVKVGDGAFMKSRSDARRLARLMVEIGEAAGRRTVAVLSNMDQPLGCAIGNALEVAEAIRVLSGEGPFDLAEIALALAEEMTVLAGVAATREEARRMLRQSVAEGRALETLRRWIAAQGGDPAVVDDPSRLPQAPVQMPYLPKKAGFVAKLSALAFGLAAMRLGAGRETKEEAIDPSVGIVLHAKVGDRVQTHRPMFTVHARTGEDALRCIQELEAAIQISDDPVEAPPLILARIDRSEALPYADLMDAAREARDRAYVPYSGFAVGAALELADGRMVTGANVENASYGLTNCAERSAVFRAVAEGGPGTKPEIRAVAVIADSPEPVSPCGACRQVLAEFCSPDTPVYLGNLQGDVRETTVGALLPGAFTDAQMANVRRQDKEA

SEQ ID NO: 184 - protein, 153 aa, synthetic construct
  REGION 1..153: note = pYY-BEM4.75; tr|A0A1G3M638|A0A1G3M638_9SPIR polypeptide sequence
MKTTNINALDKWDLRFLQMAEHVAEWSKDPSTKVGAVIVRPDRTIASVGFNGFARGVRDTVERLWNRELKYPLTVHAELNAILSAHEPVRGHSLYVSPLSPCSNCAGVIIQSGIARVVAKCGQVNNPAQWSESFNLALTAFAEAGVSVILVEH

SEQ ID NO: 185 - protein, 177 aa, synthetic construct
  REGION 1..177: note = pYY-BEM4.76; tr|A0A3D9LFR2|A0A3D9LFR2_9MICC polypeptide sequence
MEQNDHGSSGAFSDPFEDDIPLTASLPRITGTGSGIDWQRLESTARAAMTRAYVPYSRFPVGAAALVEDGRVVAGCNIENASLGLTLCAECSLVSNLQMSGGGRIVAFYCVDGNGEVLMPCGRCRQLLYEFHAPGMRLMGPDGELTMDEVLPLAFGPADMTHLSDSAASTDDPGRTR

SEQ ID NO: 186 - protein, 172 aa, synthetic construct
  REGION 1..172: note = pYY-BEM4.77; tr|A0A3B9YGB5|A0A3B9YGB5_9BACT polypeptide sequence
MAKPISKKYRKLIETAKAARKKAYSPYSRYQVGAAVLTESGRIYSGANMENASYGLCMCAERVAIANAVTRGEKVLQAVCVVGKKARPCGACRQVMLEFSTKETELLMVDIDPNARRDTVIRTRVYSMLPNPFDPFESGMLPQHPQNLLRRRKSPQPRRKRRSRPVHREVSR

SEQ ID NO: 187 - protein, 391 aa, synthetic construct
  REGION 1..391: note = pYY-BEM4.78; tr|A0A182F569|A0A182F569_ANOAL polypeptide sequence
MPRPSQFRVSSSQSLSNSQIQASQSSDSVVDITSYVNAVVKALLNLSCTKTIIKRADLVNIALKGNGRLIGRVLQDANIELKEIYGYELIEVEKSKTMILCSTLAAGSMDELNDANRRRYTFLYLILGYIFMKNGSVPETIVWEFLETLGIEEQQEHNYFGDVRKLYDSLFKQAYLTRTKQALEGLNDDVMLISWGVRSKHEVSKKDILAGFCKVMNRDPVDFKAQYIEANEKDDKMNNNINGTVDGRNTVEYSSLDASVKELIEAAIKVRNNAYCPYSNFAVGAALRTVGGDIVTGCNVENGTFGPSVCAERTAVCKAVSEGHREFTAVAVVAFQETEFTAPCGTCRQTLSEFSRKDIPIYLVKPSPVRVMVTSLFQLLPHAFSPSFLNK

SEQ ID NO: 188 - protein, 151 aa, synthetic construct
  REGION 1..151: note = pYY-BEM4.79; tr|A0A264Z0D4|A0A264Z0D4_9BACI polypeptide sequence
MEPKKLIEEAIVASKQAYVQYSNFHVGAALLTKDGKLYHGCNIENASYGLTNCAERTAIFKAVSEGEKEFQAIAVVGDTEGPISPCGACRQVLAEFFSPDTVVILANLKGDHVVTNINELLPGFFSSKDLQKKVKNCFEKNALGSSCLRPI

SEQ ID NO: 189 - protein, 229 aa, synthetic construct
  REGION 1..229: note = pYY-BEM4.80; tr|A0A1L9Q1R3|A0A1L9Q1R3_ASPVE polypeptide sequence
MPLSAEEAALVETATATINSIPLSEDYSVASAAKASDGRVFTGVNVYHFTGGPCAELVVLGVAAAAGAAQLTHIVAVANEQRGILSPCGRCRQVLLDLQPNIQVIVGKEGSEQSVPVAQLLPFSYRQPDQHTPVIFKALTSSGPVVVDFFATWCGPCKAVAPVVGKLSETYTDVRFIQVDVDKARSISQEHDIRAMPTFVLYKDGKLLDKRVVGGNMKELEEQIKAIIA

SEQ ID NO: 190 - protein, 18 aa, synthetic construct
  REGION 1..18: note = synthetic peptide
KRTADGSEFESPKKKRKV

SEQ ID NO: 191 - protein, 16 aa, synthetic construct
  REGION 1..16: note = synthetic peptide
KRPAATKKAGQAKKKK

SEQ ID NO: 192 - protein, 17 aa, synthetic construct
  REGION 1..17: note = synthetic peptide
KKTELQTTNAENKTKKL

SEQ ID NO: 193 - protein, 19 aa, synthetic construct
  REGION 1..19: note = synthetic peptide
KRGINDRNFWRGENGRKTR

SEQ ID NO: 194 - protein, 16 aa, synthetic construct
  REGION 1..16: note = synthetic peptide
RKSGKIAAIVVKRPRK

SEQ ID NO: 195 - protein, 7 aa, synthetic construct
  REGION 1..7: note = synthetic peptide
PKKKRKV

SEQ ID NO: 196 - protein, 30 aa, synthetic construct
  REGION 1..30: note = synthetic polypeptide
MDSLLMNRRKFLYQFKNVRWAKGRRETYLC

SEQ ID NO: 197 - protein, 1368 aa, Streptococcus pyogenes [sequence omitted]

SEQ ID NO: 198 - DNA, 4104 bp, Streptococcus pyogenes
  misc_feature 1..4104: note = wild type spCas9 polynucleotide sequence
  source 1..4104: mol_type = genomic DNA
atggataagaaatactcaataggcttagatatcggcacaaatagcgtcggatgggcggtgatcactgatgattataaggttccgtctaaaaagttcaaggttctgggaaatacagaccgccacagtatcaaaaaaaatcttataggggctcttttatttggcagtggagagacagcggaagcgactcgtctcaaacggacagctcgtagaaggtatacacgtcggaagaatcgtatttgttatctacaggagattttttcaaatgagatggcgaaagtagatgatagtttctttcatcgacttgaagagtcttttttggtggaagaagacaagaagcatgaacgtcatcctatttttggaaatatagtagatgaagttgcttatcatgagaaatatccaactatctatcatctgcgaaaaaaattggcagattctactgataaagcggatttgcgcttaatctatttggccttagcgcatatgattaagtttcgtggtcattttttgattgagggagatttaaatcctgataatagtgatgtggacaaactatttatccagttggtacaaatctacaatcaattatttgaagaaaaccctattaacgcaagtagagtagatgctaaagcgattctttctgcacgattgagtaaatcaagacgattagaaaatctcattgctcagctccccggtgagaagagaaatggcttgtttgggaatctcattgctttgtcattgggattgacccctaattttaaatcaaattttgatttggcagaagatgctaaattacagctttcaaaagatacttacgatgatgatttagataatttattggcgcaaattggagatcaatatgctgatttgtttttggcagctaagaatttatcagatgctattttactttcagatatcctaagagtaaatagtgaaataactaaggctcccctatcagcttcaatgattaagcgctacgatgaacatcatcaagacttgactcttttaaaagctttagttcgacaacaacttccagaaaagtataaagaaatcttttttgatcaatcaaaaaacggatatgcaggttatattgatgggggagctagccaagaagaattttataaatttatcaaaccaattttagaaaaaatggatggtactgaggaattattggtgaaactaaatcgtgaagatttgctgcgcaagcaacggacctttgacaacggctctattccccatcaaattcacttgggtgagctgcatgctattttgagaagacaagaagacttttatccatttttaaaagacaatcgtgagaagattgaaaaaatcttgacttttcgaattccttattatgttggtccattggcgcgtggcaatagtcgttttgcatggatgactcggaagtctgaagaaacaattaccccatggaattttgaagaagttgtcgataaaggtgcttcagctcaatcatttattgaacgcatgacaaactttgataaaaatcttccaaatgaaaaagtactaccaaaacatagtttgctttatgagtattttacggtttataacgaattgacaaaggtcaaatatgttactgagggaatgcgaaaaccagcatttctttcaggtgaacagaagaaagccattgttgatttactcttcaaaacaaatcgaaaagtaaccgttaagcaattaaaagaagattatttcaaaaaaatagaatgttttgatagtgttgaaatttcaggagttgaagatagatttaatgcttcattaggcgcctaccatgatttgctaaaaattattaaagataaagattttttggataatgaagaaaatgaagatatcttagaggatattgttttaacattgaccttatttgaagatagggggatgattgaggaaagacttaaaacatatgctcacctctttgatgataaggtgatgaaacagcttaaacgtcgccgttatactggttggggacgtttgtctcgaaaattgattaatggtattagggataagcaatctggcaaaacaatattagattttttgaaatcagatggttttgccaatcgcaattttatgcagctgatccatgatgatagtttgacatttaaagaagatattcaaaaagcacaggtgtctggacaaggccatagtttacatgaacagattgctaacttagctggcagtcctgctattaaaaaaggtattttacagactgtaaaaattgttgatgaactggtcaaagtaatggggcataagccagaaaatatcgttattgaaatggcacgtgaaaatcagacaactcaaaagggccagaaaaattcgcgagagcgtatgaaacgaatcgaagaaggtatcaaagaattaggaagtcagattcttaaagagcatcctgttgaaaatactcaattgcaaaatgaaaagctctatctctattatctacaaaatggaagagacatgtatgtggaccaagaattagatattaatcgtttaagtgattatgatgtcgatcacattgttccacaaagtttcattaaagacgattcaatagacaataaggtactaacgcgttctgataaaaatcgtggtaaatcggataacgttccaagtgaagaagtagtcaaaaagatgaaaaactattggagacaacttctaaacgccaagttaatcactcaacgtaagtttgataatttaacgaaagctgaacgtggaggtttgagtgaacttgataaagctggttttatcaaacgccaattggttgaaactcgccaaatcactaagcatgtggcacaaattttggatagtcgcatgaatactaaatacgatgaaaatgataaacttattcgagaggttaaagtgattaccttaaaatctaaattagtttctgacttccgaaaagatttccaattctataaagtacgtgagattaacaattaccatcatgcccatgatgcgtatctaaatgccgtcgttggaactgctttgattaagaaatatccaaaacttgaatcggagtttgtctatggtgattataaagtttatgatgttcgtaaaatgattgctaagtctgagcaagaaataggcaaagcaaccgcaaaatatttcttttactctaatatcatgaacttcttcaaaacagaaattacacttgcaaatggagagattcgcaaacgccctctaatcgaaactaatggggaaactggagaaattgtctgggataaagggcgagattttgccacagtgcgcaaagtattgtccatgccccaagtcaatattgtcaagaaaacagaagtacagacaggcggattctccaaggagtcaattttaccaaaaagaaattcggacaagcttattgctcgtaaaaaagactgggatccaaaaaaatatggtggttttgatagtccaacggtagcttattcagtcctagtggttgctaaggtggaaaaagggaaatcgaagaagttaaaatccgttaaagagttactagggatcacaattatggaaagaagttcctttgaaaaaaatccgattgactttttagaagctaaaggatataaggaagttaaaaaagacttaatcattaaactacctaaatatagtctttttgagttagaaaacggtcgtaaacggatgctggctagtgccggagaattacaaaaaggaaatgagctggctctgccaagcaaatatgtgaattttttatatttagctagtcattatgaaaagttgaagggtagtccagaagataacgaacaaaaacaattgtttgtggagcagcataagcattatttagatgagattattgagcaaatcagtgaattttctaagcgtgttattttagcagatgccaatttagataaagttcttagtgcatataacaaacatagagacaaaccaatacgtgaacaagcagaaaatattattcatttatttacgttgacgaatcttggagctcccgctgcttttaaatattttgatacaacaattgatcgtaaacgatatacgtctacaaaagaagttttagatgccactcttatccatcaatccatcactggtctttatgaaacacgcattgatttgagtcagctaggaggtgactga

SEQ ID NO: 199 - protein, 1367 aa, Streptococcus pyogenes
  REGION 1..1367: note = MISC_FEATURE - spCas9 polypeptide sequence
MDKKYSIGLDIGTNSVGWAVITDDYKVPSKKFKVLGNTDRHSIKKNLIGALLFGSGETAEATRLKRTARRRYTRRKNRICYLQEIFSNEMAKVDDSFFHRLEESFLVEEDKKHERHPIFGNIVDEVAYHEKYPTIYHLRKKLADSTDKADLRLIYLALAHMIKFRGHFLIEGDLNPDNSDVDKLFIQLVQIYNQLFEENPINASRVDAKAILSARLSKSRRLENLIAQLPGEKRNGLFGNLIALSLGLTPNFKSNFDLAEDAKLQLSKDTYDDDLDNLLAQIGDQYADLFLAAKNLSDAILLSDILRVNSEITKAPLSASMIKRYDEHHQDLTLLKALVRQQLPEKYKEIFFDQSKNGYAGYIDGGASQEEFYKFIKPILEKMDGTEELLVKLNREDLLRKQRTFDNGSIPHQIHLGELHAILRRQEDFYPFLKDNREKIEKILTFRIPYYVGPLARGNSRFAWMTRKSEETITPWNFEEVVDKGASAQSFIERMTNFDKNLPNEKVLPKHSLLYEYFTVYNELTKVKYVTEGMRKPAFLSGEQKKAIVDLLFKTNRKVTVKQLKEDYFKKIECFDSVEISGVEDRFNASLGAYHDLLKIIKDKDFLDNEENEDILEDIVLTLTLFEDRGMIEERLKTYAHLFDDKVMKQLKRRRYTGWGRLSRKLINGIRDKQSGKTILDFLKSDGFANRNFMQLIHDDSLTFKEDIQKAQVSGQGHSLHEQIANLAGSPAIKKGILQTVKIVDELVKVMGHKPENIVIEMARENQTTQKGQKNSRERMKRIEEGIKELGSQILKEHPVENTQLQNEKLYLYYLQNGRDMYVDQELDINRLSDYDVDHIVPQSFIKDDSIDNKVLTRSDKNRGKSDNVPSEEVVKKMKNYWRQLLNAKLITQRKFDNLTKAERGGLSELDKAGFIKRQLVETRQITKHVAQILDSRMNTKYDENDKLIREVKVITLKSKLVSDFRKDFQFYKVREINNYHHAHDAYLNAVVGTALIKKYPKLESEFVYGDYKVYDVRKMIAKSEQEIGKATAKYFFYSNIMNFFKTEITLANGEIRKRPLIETNGETGEIVWDKGRDFATVRKVLSMPQVNIVKKTEVQTGGFSKESILPKRNSDKLIARKKDWDPKKYGGFDSPTVAYSVLVVAKVEKGKSKKLKSVKELLGITIMERSSFEKNPIDFLEAKGYKEVKKDLIIKLPKYSLFELENGRKRMLASAGELQKGNELALPSKYVNFLYLASHYEKLKGSPEDNEQKQLFVEQHKHYLDEIIEQISEFSKRVILADANLDKVLSAYNKHRDKPIREQAENIIHLFTLTNLGAPAAFKYFDTTIDRKRYTSTKEVLDATLIHQSITGLYETRIDLSQLGGD

SEQ ID NO: 200 - DNA, 4212 bp, synthetic construct
  misc_feature 1..4212: note = wild-type Cas9 polynucleotide sequence
  misc_feature 5..58: note = RuvC domain
  misc_feature 718..764: note = RuvC domain
  misc_feature 772..901: note = HNH domain
  misc_feature 906..1101: note = RuvC domain
  source 1..4212: mol_type = other DNA
atggataaaaagtattctattggtttagacatcggcactaattccgttggatgggctgtcataaccgatgaatacaaagtaccttcaaagaaatttaaggtgttggggaacacagaccgtcattcgattaaaaagaatcttatcggtgccctcctattcgatagtggcgaaacggcagaggcgactcgcctgaaacgaaccgctcggagaaggtatacacgtcgcaagaaccgaatatgttacttacaagaaatttttagcaatgagatggccaaagttgacgattctttctttcaccgtttggaagagtccttccttgtcgaagaggacaagaaacatgaacggcaccccatctttggaaacatagtagatgaggtggcatatcatgaaaagtacccaacgatttatcacctcagaaaaaagctagttgactcaactgataaagcggacctgaggttaatctacttggctcttgcccatatgataaagttccgtgggcactttctcattgagggtgatctaaatccggacaactcggatgtcgacaaactgttcatccagttagtacaaacctataatcagttgtttgaagagaaccctataaatgcaagtggcgtggatgcgaaggctattcttagcgcccgcctctctaaatcccgacggctagaaaacctgatcgcacaattacccggagagaagaaaaatgggttgttcggtaaccttatagcgctctcactaggcctgacaccaaattttaagtcgaacttcgacttagctgaagatgccaaattgcagcttagtaaggacacgtacgatgacgatctcgacaatctactggcacaaattggagatcagtatgcggacttatttttggctgccaaaaaccttagcgatgcaatcctcctatctgacatactgagagttaatactgagattaccaaggcgccgttatccgcttcaatgatcaaaaggtacgatgaacatcaccaagacttgacacttctcaaggccctagtccgtcagcaactgcctgagaaatataaggaaatattctttgatcagtcgaaaaacgggtacgcaggttatattgacggcggagcgagtcaagaggaattctacaagtttatcaaacccatattagagaagatggatgggacggaagagttgcttgtaaaactcaatcgcgaagatctactgcgaaagcagcggactttcgacaacggtagcattccacatcaaatccacttaggcgaattgcatgctatacttagaaggcaggaggatttttatccgttcctcaaagacaatcgtgaaaagattgagaaaatcctaacctttcgcataccttactatgtgggacccctggcccgagggaactctcggttcgcatggatgacaagaaagtccgaagaaacgattactccatggaattttgaggaagttgtcgataaaggtgcgtcagctcaatcgttcatcgagaggatgaccaactttgacaagaatttaccgaacgaaaaagtattgcctaagcacagtttactttacgagtatttcacagtgtacaatgaactcacgaaagttaagtatgtcactgagggcatgcgtaaacccgcctttctaagcggagaacagaagaaagcaatagtagatctgttattcaagaccaaccgcaaagtgacagttaagcaattgaaagaggactactttaagaaaattgaatgcttcgattctgtcgagatctccggggtagaagatcgatttaatgcgtcacttggtacgtatcatgacctcctaaagataattaaagataaggacttcctggataacgaagagaatgaagatatcttagaagatatagtgttgactcttaccctctttgaagatcgggaaatgattgaggaaagactaaaaacatacgctcacctgttcgacgataaggttatgaaacagttaaagaggcgtcgctatacgggctggggacgattgtcgcggaaacttatcaacgggataagagacaagcaaagtggtaaaactattctcgattttctaaagagcgacggcttcgccaataggaactttatgcagctgatccatgatgactctttaaccttcaaagaggatatacaaaaggcacaggtttccggacaaggggactcattgcacgaacatattgcgaatcttgctggttcgccagccatcaaaaagggcatactccagacagtcaaagtagtggatgagctagttaaggtcatgggacgtcacaaaccggaaaacattgtaatcgagatggcacgcgaaaatcaaacgactcagaaggggcaaaaaaacagtcgagagcggatgaagagaatagaagagggtattaaagaactgggcagccagatcttaaaggagcatcctgtggaaaatacccaattgcagaacgagaaactttacctctattacctacaaaatggaagggacatgtatgttgatcaggaactggacataaaccgtttatctgattacgacgtcgatcacattgtaccccaatcctttttgaaggacgattcaatcgacaataaagtgcttacacgctcggataagaaccgagggaaaagtgacaatgttccaagcgaggaagtcgtaaagaaaatgaagaactattggcggcagctcctaaatgcgaaactgataacgcaaagaaagttcgataacttaactaaagctgagaggggtggcttgtctgaacttgacaaggccggatttattaaacgtcagctcgtggaaacccgccaaatcacaaagcatgttgcacagatactagattcccgaatgaatacgaaatacgacgagaacgataagctgattcgggaagtcaaagtaatcactttaaagtcaaaattggtgtcggacttcagaaaggattttcaattctataaagttagggagataaataactaccaccatgcgcacgacgcttatcttaatgccgtcgtagggaccgcactcattaagaaatacccgaagctagaaagtgagtttgtgtatggtgattacaaagtttatgacgtccgtaagatgatcgcgaaaagcgaacaggagataggcaaggctacagccaaatacttcttttattctaacattatgaatttctttaagacggaaatcactctggcaaacggagagatacgcaaacgacctttaattgaaaccaatggggagacaggtgaaatcgtatgggataagggccgggacttcgcgacggtgagaaaagttttgtccatgccccaagtcaacatagtaaagaaaactgaggtgcagaccggagggttttcaaaggaatcgattcttccaaaaaggaatagtgataagctcatcgctcgtaaaaaggactgggacccgaaaaagtacggtggcttcgatagccctacagttgcctattctgtcctagtagtggcaaaagttgagaagggaaaatccaagaaactgaagtcagtcaaagaattattggggataacgattatggagcgctcgtcttttgaaaagaaccccatcgacttccttgaggcgaaaggttacaaggaagtaaaaaaggatctcataattaaactaccaaagtatagtctgtttgagttagaaaatggccgaaaacggatgttggctagcgccggagagcttcaaaaggggaacgaactcgcactaccgtctaaatacgtgaatttcctgtatttagcgtcccattacgagaagttgaaaggttcacctgaagataacgaacagaagcaactttttgttgagcagcacaaacattatctcgacgaaatcatagagcaaatttcggaattcagtaagagagtcatcctagctgatgccaatctggacaaagtattaagcgcatacaacaagcacagggataaacccatacgtgagcaggcggaaaatattatccatttgtttactcttaccaacctcggcgctccagccgcattcaagtattttgacacaacgatagatcgcaaacgatacacttctaccaaggaggtgctagacgcgacactgattcaccaatccatcacgggattatatgaaactcggatagatttgtcacagcttgggggtgacggatcccccaagaagaagaggaaagtctcgagcgactacaaagaccatgacggtgattataaagatcatgacatcgattacaaggatgacgatgacaaggctgcagga

SEQ ID NO: 201 - protein, 1368 aa, synthetic construct
  REGION 1..1368: note = exemplary catalytically active Cas9 nickase (nCas9) polypeptide sequence
MDKKYSIGLAIGTNSVGWAVITDEYKVPSKKFKVLGNTDRHSIKKNLIGALLFDSGETAEATRLKRTARRRYTRRKNRICYLQEIFSNEMAKVDDSFFHRLEESFLVEEDKKHERHPIFGNIVDEVAYHEKYPTIYHLRKKLVDSTDKADLRLIYLALAHMIKFRGHFLIEGDLNPDNSDVDKLFIQLVQTYNQLFEENPINASGVDAKAILSARLSKSRRLENLIAQLPGEKKNGLFGNLIALSLGLTPNFKSNFDLAEDAKLQLSKDTYDDDLDNLLAQIGDQYADLFLAAKNLSDAILLSDILRVNTEITKAPLSASMIKRYDEHHQDLTLLKALVRQQLPEKYKEIFFDQSKNGYAGYIDGGASQEEFYKFIKPILEKMDGTEELLVKLNREDLLRKQRTFDNGSIPHQIHLGELHAILRRQEDFYPFLKDNREKIEKILTFRIPYYVGPLARGNSRFAWMTRKSEETITPWNFEEVVDKGASAQSFIERMTNFDKNLPNEKVLPKHSLLYEYFTVYNELTKVKYVTEGMRKPAFLSGEQKKAIVDLLFKTNRKVTVKQLKEDYFKKIECFDSVEISGVEDRFNASLGTYHDLLKIIKDKDFLDNEENEDILEDIVLTLTLFEDREMIEERLKTYAHLFDDKVMKQLKRRRYTGWGRLSRKLINGIRDKQSGKTILDFLKSDGFANRNFMQLIHDDSLTFKEDIQKAQVSGQGDSLHEHIANLAGSPAIKKGILQTVKVVDELVKVMGRHKPENIVIEMARENQTTQKGQKNSRERMKRIEEGIKELGSQILKEHPVENTQLQNEKLYLYYLQNGRDMYVDQELDINRLSDYDVDHIVPQSFLKDDSIDNKVLTRSDKNRGKSDNVPSEEVVKKMKNYWRQLLNAKLITQRKFDNLTKAERGGLSELDKAGFIKRQLVETRQITKHVAQILDSRMNTKYDENDKLIREVKVITLKSKLVSDFRKDFQFYKVREINNYHHAHDAYLNAVVGTALIKKYPKLESEFVYGDYKVYDVRKMIAKSEQEIGKATAKYFFYSNIMNFFKTEITLANGEIRKRPLIETNGETGEIVWDKGRDFATVRKVLSMPQVNIVKKTEVQTGGFSKESILPKRNSDKLIARKKDWDPKKYGGFDSPTVAYSVLVVAKVEKGKSKKLKSVKELLGITIMERSSFEKNPIDFLEAKGYKEVKKDLIIKLPKYSLFELENGRKRMLASAGELQKGNELALPSKYVNFLYLASHYEKLKGSPEDNEQKQLFVEQHKHYLDEIIEQISEFSKRVILADANLDKVLSAYNKHRDKPIREQAENIIHLFTLTNLGAPAAFKYFDTTIDRKRYTSTKEVLDATLIHQSITGLYETRIDLSQLGGD

SEQ ID NO: 202 - DNA, 4107 bp, Streptococcus pyogenes
  misc_feature 1..4107: note = Cas9 from Streptococcus pyogenes (NCBI Ref. Seq.: NC_002737.2)polynucleotide sequence
  source 1..4107: mol_type = genomic DNA
atggataagaaatactcaataggcttagatatcggcacaaatagcgtcggatgggcggtgatcactgatgaatataaggttccgtctaaaaagttcaaggttctgggaaatacagaccgccacagtatcaaaaaaaatcttataggggctcttttatttgacagtggagagacagcggaagcgactcgtctcaaacggacagctcgtagaaggtatacacgtcggaagaatcgtatttgttatctacaggagattttttcaaatgagatggcgaaagtagatgatagtttctttcatcgacttgaagagtcttttttggtggaagaagacaagaagcatgaacgtcatcctatttttggaaatatagtagatgaagttgcttatcatgagaaatatccaactatctatcatctgcgaaaaaaattggtagattctactgataaagcggatttgcgcttaatctatttggccttagcgcatatgattaagtttcgtggtcattttttgattgagggagatttaaatcctgataatagtgatgtggacaaactatttatccagttggtacaaacctacaatcaattatttgaagaaaaccctattaacgcaagtggagtagatgctaaagcgattctttctgcacgattgagtaaatcaagacgattagaaaatctcattgctcagctccccggtgagaagaaaaatggcttatttgggaatctcattgctttgtcattgggtttgacccctaattttaaatcaaattttgatttggcagaagatgctaaattacagctttcaaaagatacttacgatgatgatttagataatttattggcgcaaattggagatcaatatgctgatttgtttttggcagctaagaatttatcagatgctattttactttcagatatcctaagagtaaatactgaaataactaaggctcccctatcagcttcaatgattaaacgctacgatgaacatcatcaagacttgactcttttaaaagctttagttcgacaacaacttccagaaaagtataaagaaatcttttttgatcaatcaaaaaacggatatgcaggttatattgatgggggagctagccaagaagaattttataaatttatcaaaccaattttagaaaaaatggatggtactgaggaattattggtgaaactaaatcgtgaagatttgctgcgcaagcaacggacctttgacaacggctctattccccatcaaattcacttgggtgagctgcatgctattttgagaagacaagaagacttttatccatttttaaaagacaatcgtgagaagattgaaaaaatcttgacttttcgaattccttattatgttggtccattggcgcgtggcaatagtcgttttgcatggatgactcggaagtctgaagaaacaattaccccatggaattttgaagaagttgtcgataaaggtgcttcagctcaatcatttattgaacgcatgacaaactttgataaaaatcttccaaatgaaaaagtactaccaaaacatagtttgctttatgagtattttacggtttataacgaattgacaaaggtcaaatatgttactgaaggaatgcgaaaaccagcatttctttcaggtgaacagaagaaagccattgttgatttactcttcaaaacaaatcgaaaagtaaccgttaagcaattaaaagaagattatttcaaaaaaatagaatgttttgatagtgttgaaatttcaggagttgaagatagatttaatgcttcattaggtacctaccatgatttgctaaaaattattaaagataaagattttttggataatgaagaaaatgaagatatcttagaggatattgttttaacattgaccttatttgaagatagggagatgattgaggaaagacttaaaacatatgctcacctctttgatgataaggtgatgaaacagcttaaacgtcgccgttatactggttggggacgtttgtctcgaaaattgattaatggtattagggataagcaatctggcaaaacaatattagattttttgaaatcagatggttttgccaatcgcaattttatgcagctgatccatgatgatagtttgacatttaaagaagacattcaaaaagcacaagtgtctggacaaggcgatagtttacatgaacatattgcaaatttagctggtagccctgctattaaaaaaggtattttacagactgtaaaagttgttgatgaattggtcaaagtaatggggcggcataagccagaaaatatcgttattgaaatggcacgtgaaaatcagacaactcaaaagggccagaaaaattcgcgagagcgtatgaaacgaatcgaagaaggtatcaaagaattaggaagtcagattcttaaagagcatcctgttgaaaatactcaattgcaaaatgaaaagctctatctctattatctccaaaatggaagagacatgtatgtggaccaagaattagatattaatcgtttaagtgattatgatgtcgatcacattgttccacaaagtttccttaaagacgattcaatagacaataaggtcttaacgcgttctgataaaaatcgtggtaaatcggataacgttccaagtgaagaagtagtcaaaaagatgaaaaactattggagacaacttctaaacgccaagttaatcactcaacgtaagtttgataatttaacgaaagctgaacgtggaggtttgagtgaacttgataaagctggttttatcaaacgccaattggttgaaactcgccaaatcactaagcatgtggcacaaattttggatagtcgcatgaatactaaatacgatgaaaatgataaacttattcgagaggttaaagtgattaccttaaaatctaaattagtttctgacttccgaaaagatttccaattctataaagtacgtgagattaacaattaccatcatgcccatgatgcgtatctaaatgccgtcgttggaactgctttgattaagaaatatccaaaacttgaatcggagtttgtctatggtgattataaagtttatgatgttcgtaaaatgattgctaagtctgagcaagaaataggcaaagcaaccgcaaaatatttcttttactctaatatcatgaacttcttcaaaacagaaattacacttgcaaatggagagattcgcaaacgccctctaatcgaaactaatggggaaactggagaaattgtctgggataaagggcgagattttgccacagtgcgcaaagtattgtccatgccccaagtcaatattgtcaagaaaacagaagtacagacaggcggattctccaaggagtcaattttaccaaaaagaaattcggacaagcttattgctcgtaaaaaagactgggatccaaaaaaatatggtggttttgatagtccaacggtagcttattcagtcctagtggttgctaaggtggaaaaagggaaatcgaagaagttaaaatccgttaaagagttactagggatcacaattatggaaagaagttcctttgaaaaaaatccgattgactttttagaagctaaaggatataaggaagttaaaaaagacttaatcattaaactacctaaatatagtctttttgagttagaaaacggtcgtaaacggatgctggctagtgccggagaattacaaaaaggaaatgagctggctctgccaagcaaatatgtgaattttttatatttagctagtcattatgaaaagttgaagggtagtccagaagataacgaacaaaaacaattgtttgtggagcagcataagcattatttagatgagattattgagcaaatcagtgaattttctaagcgtgttattttagcagatgccaatttagataaagttcttagtgcatataacaaacatagagacaaaccaatacgtgaacaagcagaaaatattattcatttatttacgttgacgaatcttggagctcccgctgcttttaaatattttgatacaacaattgatcgtaaacgatatacgtctacaaaagaagttttagatgccactcttatccatcaatccatcactggtctttatgaaacacgcattgatttgagtcagctaggaggtgactga

SEQ ID NO: 203 - protein, 1368 aa, synthetic construct
  REGION 1..1368: note = catalytically inactive Cas9 (dCas9)polypeptide sequence
  REGION 5..58: note = MISC_FEATURE - RuvC domain
  REGION 718..764: note = MISC_FEATURE - RuvC domain
  REGION 773..902: note = MISC_FEATURE - HNH domain
  REGION 907..1102: note = MISC_FEATURE - RuvC domain
MDKKYSIGLAIGTNSVGWAVITDEYKVPSKKFKVLGNTDRHSIKKNLIGALLFDSGETAEATRLKRTARRRYTRRKNRICYLQEIFSNEMAKVDDSFFHRLEESFLVEEDKKHERHPIFGNIVDEVAYHEKYPTIYHLRKKLVDSTDKADLRLIYLALAHMIKFRGHFLIEGDLNPDNSDVDKLFIQLVQTYNQLFEENPINASGVDAKAILSARLSKSRRLENLIAQLPGEKKNGLFGNLIALSLGLTPNFKSNFDLAEDAKLQLSKDTYDDDLDNLLAQIGDQYADLFLAAKNLSDAILLSDILRVNTEITKAPLSASMIKRYDEHHQDLTLLKALVRQQLPEKYKEIFFDQSKNGYAGYIDGGASQEEFYKFIKPILEKMDGTEELLVKLNREDLLRKQRTFDNGSIPHQIHLGELHAILRRQEDFYPFLKDNREKIEKILTFRIPYYVGPLARGNSRFAWMTRKSEETITPWNFEEVVDKGASAQSFIERMTNFDKNLPNEKVLPKHSLLYEYFTVYNELTKVKYVTEGMRKPAFLSGEQKKAIVDLLFKTNRKVTVKQLKEDYFKKIECFDSVEISGVEDRFNASLGTYHDLLKIIKDKDFLDNEENEDILEDIVLTLTLFEDREMIEERLKTYAHLFDDKVMKQLKRRRYTGWGRLSRKLINGIRDKQSGKTILDFLKSDGFANRNFMQLIHDDSLTFKEDIQKAQVSGQGDSLHEHIANLAGSPAIKKGILQTVKVVDELVKVMGRHKPENIVIEMARENQTTQKGQKNSRERMKRIEEGIKELGSQILKEHPVENTQLQNEKLYLYYLQNGRDMYVDQELDINRLSDYDVDAIVPQSFLKDDSIDNKVLTRSDKNRGKSDNVPSEEVVKKMKNYWRQLLNAKLITQRKFDNLTKAERGGLSELDKAGFIKRQLVETRQITKHVAQILDSRMNTKYDENDKLIREVKVITLKSKLVSDFRKDFQFYKVREINNYHHAHDAYLNAVVGTALIKKYPKLESEFVYGDYKVYDVRKMIAKSEQEIGKATAKYFFYSNIMNFFKTEITLANGEIRKRPLIETNGETGEIVWDKGRDFATVRKVLSMPQVNIVKKTEVQTGGFSKESILPKRNSDKLIARKKDWDPKKYGGFDSPTVAYSVLVVAKVEKGKSKKLKSVKELLGITIMERSSFEKNPIDFLEAKGYKEVKKDLIIKLPKYSLFELENGRKRMLASAGELQKGNELALPSKYVNFLYLASHYEKLKGSPEDNEQKQLFVEQHKHYLDEIIEQISEFSKRVILADANLDKVLSAYNKHRDKPIREQAENIIHLFTLTNLGAPAAFKYFDTTIDRKRYTSTKEVLDATLIHQSITGLYETRIDLSQLGGD

SEQ ID NO: 204 - protein, 345 aa, Sulfolobus islandicus
  REGION 1..345: note = MISC_FEATURE - tr|F0NN87|F0NN87_SULIHCRISPR-associatedCasx protein OS =Sulfolobus islandicus (strain HVE10/4) GN = SiH_0402 PE=4; SV = 1);CasX polypeptide sequence
MEVPLYNIFGDNYIIQVATEAENSTIYNNKVEIDDEELRNVLNLAYKIAKNNEDAAAERRGKAKKKKGEEGETTTSNIILPLSGNDKNPWTETLKCYNFPTTVALSEVFKNFSQVKECEEVSAPSFVKPEFYEFGRSPGMVERTRRVKLEVEPHYLIIAAAGWVLTRLGKAKVSEGDYVGVNVFTPTRGILYSLIQNVNGIVPGIKPETAFGLWIARKVVSSVTNPNVSVVRIYTISDAVGQNPTTINGGFSIDLTKLLEKRYLLSERLEAIARNALSISSNMRERYIVLANYIYEYLTGSKRLEDLLYFANRDLIMNLNSDDGKVRDLKLISAYVNGELIRGEG

SEQ ID NO: 205 - protein, 345 aa, Sulfolobus islandicus
  REGION 1..345: note = MISC_FEATURE - tr|F0NH53|F0NH53_SULIR CRISPR associated protein, Casx OS =Sulfolobus islandicus (strain REY15A) GN=SiRe_0771 PE=4 SV=1);CasX polypeptide sequence
MEVPLYNIFGDNYIIQVATEAENSTIYNNKVEIDDEELRNVLNLAYKIAKNNEDAAAERRGKAKKKKGEEGETTTSNIILPLSGNDKNPWTETLKCYNFPTTVALSEVFKNFSQVKECEEVSAPSFVKPEFYKFGRSPGMVERTRRVKLEVEPHYLIMAAAGWVLTRLGKAKVSEGDYVGVNVFTPTRGILYSLIQNVNGIVPGIKPETAFGLWIARKVVSSVTNPNVSVVSIYTISDAVGQNPTTINGGFSIDLTKLLEKRDLLSERLEAIARNALSISSNMRERYIVLANYIYEYLTGSKRLEDLLYFANRDLIMNLNSDDGKVRDLKLISAYVNGELIRGEG

SEQ ID NO: 206 - protein, 987 aa, unidentified
  REGION 1..987: note = MISC_FEATURE - CasX polypeptide sequence
MEKRINKIRKKLSADNATKPVSRSGPMKTLLVRVMTDDLKKRLEKRRKKPEVMPQVISNNAANNLRMLLDDYTKMKEAILQVYWQEFKDDHVGLMCKFAQPASKKIDQNKLKPEMDEKGNLTTAGFACSQCGQPLFVYKLEQVSEKGKAYTNYFGRCNVAEHEKLILLAQLKPVKDSDEAVTYSLGKFGQRALDFYSIHVTKESTHPVKPLAQIAGNRYASGPVGKALSDACMGTIASFLSKYQDIIIEHQKVVKGNQKRLESLRELAGKENLEYPSVTLPPQPHTKEGVDFAYNEVIARVRMWVNLNLWQKLKLSRDDAKPLLRLKGFPSFPVVERRENEVDWWNTINEVKKLIDAKRDMGRVFWSGVTAEKRNTILEGYNYLPNENDHKKREGSLENPKKPAKRQFGDLLLYLEKKYAGDWGKVFDEAWERIDKKIAGLTSHIEREEARNAEDAQSKAVLTDWLRAKASFVLERLKEMDEKEFYACEIQLQKWYGDLRGNPFAVEAENRVVDISGFSIGSDGHSIQYRNLLAWKYLENGKREFYLLMNYGKKGRIRFTDGTDIKKSGKWQGLLYGGGKAKVIDLTFDPDDEQLIILPLAFGTRQGREFIWNDLLSLETGLIKLANGRVIEKTIYNKKIGRDEPALFVALTFERREVVDPSNIKPVNLIGVARGENIPAVIALTDPEGCPLPEFKDSSGGPTDILRIGEGYKEKQRAIQAAKEVEQRRAGGYSRKFASKSRNLADDMVRNSARDLFYHAVTHDAVLVFANLSRGFGRQGKRTFMTERQYTKMEDWLTAKLAYEGLTSKTYLSKTLAQYTSKTCSNCGFTITYADMDVMLVRLKKTSDGWATTLNNKELKAEYQITYYNRYKRQTVEKELSAELDRLSEESGNNDISKWTKGRRDEALFLLKKRFSHRPVQEQFVCLDCGHEVHAAEQAALNIARSWLFLNSNSTEFKSYKSGKQPFVGAWQAFYKRRLKEVWKPNA

SEQ ID NO: 207 - protein, 1210 aa, unidentified
  REGION 1..1210: note = MISC_FEATURE - APG80656.1 CRISPR-associated protein CasY [uncultured Parcubacteria group bacterium]; CasY polypeptide sequence
MSKRHPRISGVKGYRLHAQRLEYTGKSGAMRTIKYPLYSSPSGGRTVPREIVSAINDDYVGLYGLSNFDDLYNAEKRNEEKVYSVLDFWYDCVQYGAVFSYTAPGLLKNVAEVRGGSYELTKTLKGSHLYDELQIDKVIKFLNKKEISRANGSLDKLKKDIIDCFKAEYRERHKDQCNKLADDIKNAKKDAGASLGERQKKLFRDFFGISEQSENDKPSFTNPLNLTCCLLPFDTVNNNRNRGEVLFNKLKEYAQKLDKNEGSLEMWEYIGIGNSGTAFSNFLGEGFLGRLRENKITELKKAMMDITDAWRGQEQEEELEKRLRILAALTIKLREPKFDNHWGGYRSDINGKLSSWLQNYINQTVKIKEDLKGHKKDLKKAKEMINRFGESDTKEEAVVSSLLESIEKIVPDDSADDEKPDIPAIAIYRRFLSDGRLTLNRFVQREDVQEALIKERLEAEKKKKPKKRKKKSDAEDEKETIDFKELFPHLAKPLKLVPNFYGDSKRELYKKYKNAAIYTDALWKAVEKIYKSAFSSSLKNSFFDTDFDKDFFIKRLQKIFSVYRRFNTDKWKPIVKNSFAPYCDIVSLAENEVLYKPKQSRSRKSAAIDKNRVRLPSTENIAKAGIALARELSVAGFDWKDLLKKEEHEEYIDLIELHKTALALLLAVTETQLDISALDFVENGTVKDFMKTRDGNLVLEGRFLEMFSQSIVFSELRGLAGLMSRKEFITRSAIQTMNGKQAELLYIPHEFQSAKITTPKEMSRAFLDLAPAEFATSLEPESLSEKSLLKLKQMRYYPHYFGYELTRTGQGIDGGVAENALRLEKSPVKKREIKCKQYKTLGRGQNKIVLYVRSSYYQTQFLEWFLHRPKNVQTDVAVSGSFLIDEKKVKTRWNYDALTVALEPVSGSERVFVSQPFTIFPEKSAEEEGQRYLGIDIGEYGIAYTALEITGDSAKILDQNFISDPQLKTLREEVKGLKLDQRRGTFAMPSTKIARIRESLVHSLRNRIHHLALKHKAKIVYELEVSRFEEGKQKIKKVYATLKKADVYSEIDADKNLQTTVWGKLAVASEISASYTSQFCGACKKLWRAEMQVDETITTQELIGTVRVIKGGTLIDAIKDFMRPPIFDENDTPFPKYRDFCDKHHISKKMRGNSCLFICPFCRANADADIQASQTIALLRYVKEEKKVEDYFERFRKLKNIKVLGQMKKI

SEQ ID NO: 208 - protein, 1082 aa, Neisseria meningitidis
  REGION 1..1082: note = MISC_FEATURE - NCBI Reference: WP_002235162.1; type II CRISPR RNA-guided endonuclease Cas9; Nme1Cas9 polypeptide sequence
MAAFKPNPINYILGLDIGIASVGWAMVEIDEDENPICLIDLGVRVFERAEVPKTGDSLAMARRLARSVRRLTRRRAHRLLRARRLLKREGVLQAADFDENGLIKSLPNTPWQLRAAALDRKLTPLEWSAVLLHLIKHRGYLSQRKNEGETADKELGALLKGVADNAHALQTGDFRTPAELALNKFEKESGHIRNQRGDYSHTFSRKDLQAELILLFEKQKEFGNPHVSGGLKEGIETLLMTQRPALSGDAVQKMLGHCTFEPAEPKAAKNTYTAERFIWLTKLNNLRILEQGSERPLTDTERATLMDEPYRKSKLTYAQARKLLGLEDTAFFKGLRYGKDNAEASTLMEMKAYHAISRALEKEGLKDKKSPLNLSPELQDEIGTAFSLFKTDEDITGRLKDRIQPEILEALLKHISFDKFVQISLKALRRIVPLMEQGKRYDEACAEIYGDHYGKKNTEEKIYLPPIPADEIRNPVVLRALSQARKVINGVVRRYGSPARIHIETAREVGKSFKDRKEIEKRQEENRKDREKAAAKFREYFPNFVGEPKSKDILKLRLYEQQHGKCLYSGKEINLGRLNEKGYVEIDHALPFSRTWDDSFNNKVLVLGSENQNKGNQTPYEYFNGKDNSREWQEFKARVETSRFPRSKKQRILLQKFDEDGFKERNLNDTRYVNRFLCQFVADRMRLTGKGKKRVFASNGQITNLLRGFWGLRKVRAENDRHHALDAVVVACSTVAMQQKITRFVRYKEMNAFDGKTIDKETGEVLHQKTHFPQPWEFFAQEVMIRVFGKPDGKPEFEEADTPEKLRTLLAEKLSSRPEAVHEYVTPLFVSRAPNRKMSGQGHMETVKSAKRLDEGVSVLRVPLTQLKLKDLEKMVNREREPKLYEALKARLEAHKDDPAKAFAEPFYKYDKAGNRTQQVKAVRVEQVQKTGVWVRNHNGIADNATMVRVDVFEKGDKYYLVPIYSWQVAKGILPDRAVVQGKDEEDWQLIDDSFNFKFSLHPNDLVEVITKKARMFGYFASCHRGTGNINIRIHDLDHKIGKNGILEGIGVKTALSFQKYQIDELGKEIRPCRLKKRPPVR

SEQ ID NO: 209 - protein, 1082 aa, Neisseria meningitidis
  REGION 1..1082: note = MISC_FEATURE - NCBI Reference: WP_002230835; type II CRISPR RNA-guided endonuclease Cas9; Nme2Cas9 polypeptide sequence
MAAFKPNPINYILGLDIGIASVGWAMVEIDEEENPIRLIDLGVRVFERAEVPKTGDSLAMARRLARSVRRLTRRRAHRLLRARRLLKREGVLQAADFDENGLIKSLPNTPWQLRAAALDRKLTPLEWSAVLLHLIKHRGYLSQRKNEGETADKELGALLKGVANNAHALQTGDFRTPAELALNKFEKESGHIRNQRGDYSHTFSRKDLQAELILLFEKQKEFGNPHVSGGLKEGIETLLMTQRPALSGDAVQKMLGHCTFEPAEPKAAKNTYTAERFIWLTKLNNLRILEQGSERPLTDTERATLMDEPYRKSKLTYAQARKLLGLEDTAFFKGLRYGKDNAEASTLMEMKAYHAISRALEKEGLKDKKSPLNLSSELQDEIGTAFSLFKTDEDITGRLKDRVQPEILEALLKHISFDKFVQISLKALRRIVPLMEQGKRYDEACAEIYGDHYGKKNTEEKIYLPPIPADEIRNPVVLRALSQARKVINGVVRRYGSPARIHIETAREVGKSFKDRKEIEKRQEENRKDREKAAAKFREYFPNFVGEPKSKDILKLRLYEQQHGKCLYSGKEINLVRLNEKGYVEIDHALPFSRTWDDSFNNKVLVLGSENQNKGNQTPYEYFNGKDNSREWQEFKARVETSRFPRSKKQRILLQKFDEDGFKECNLNDTRYVNRFLCQFVADHILLTGKGKRRVFASNGQITNLLRGFWGLRKVRAENDRHHALDAVVVACSTVAMQQKITRFVRYKEMNAFDGKTIDKETGKVLHQKTHFPQPWEFFAQEVMIRVFGKPDGKPEFEEADTPEKLRTLLAEKLSSRPEAVHEYVTPLFVSRAPNRKMSGAHKDTLRSAKRFVKHNEKISVKRVWLTEIKLADLENMVNYKNGREIELYEALKARLEAYGGNAKQAFDPKDNPFYKKGGQLVKAVRVEKTQESGVLLNKKNAYTIADNGDMVRVDVFCKVDKKGKNQYFIVPIYAWQVAENILPDIDCKGYRIDDSYTFCFSLHKYDLIAFQKDEKSKVEFAYYINCDSSNGRFYLAWHDKGSKEQQFRISTQNLVLIQKYQVNELGKEIRPCRLKKRPPVR

SEQ ID NO: 210 - protein, 1300 aa, Francisella tularensis
  REGION 1..1300: note = MISC_FEATURE - wild type Cpf1 polypeptide sequence
  source 1..1300: note = subspecies novicida
MSIYQEFVNKYSLSKTLRFELIPQGKTLENIKARGLILDDEKRAKDYKKAKQIIDKYHQFFIEEILSSVCISEDLLQNYSDVYFKLKKSDDDNLQKDFKSAKDTIKKQISEYIKDSEKFKNLFNQNLIDAKKGQESDLILWLKQSKDNGIELFKANSDITDIDEALEIIKSFKGWTTYFKGFHENRKNVYSSNDIPTSIIYRIVDDNLPKFLENKAKYESLKDKAPEAINYEQIKKDLAEELTFDIDYKTSEVNQRVFSLDEVFEIANFNNYLNQSGITKFNTIIGGKFVNGENTKRKGINEYINLYSQQINDKTLKKYKMSVLFKQILSDTESKSFVIDKLEDDSDVVTTMQSFYEQIAAFKTVEEKSIKETLSLLFDDLKAQKLDLSKIYFKNDKSLTDLSQQVFDDYSVIGTAVLEYITQQIAPKNLDNPSKKEQELIAKKTEKAKYLSLETIKLALEEFNKHRDIDKQCRFEEILANFAAIPMIFDEIAQNKDNLAQISIKYQNQGKKDLLQASAEDDVKAIKDLLDQTNNLLHKLKIFHISQSEDKANILDKDEHFYLVFEECYFELANIVPLYNKIRNYITQKPYSDEKFKLNFENSTLANGWDKNKEPDNTAILFIKDDKYYLGVMNKKNNKIFDDKAIKENKGEGYKKIVYKLLPGANKMLPKVFFSAKSIKFYNPSEDILRIRNHSTHTKNGSPQKGYEKFEFNIEDCRKFIDFYKQSISKHPEWKDFGFRFSDTQRYNSIDEFYREVENQGYKLTFENISESYIDSVVNQGKLYLFQIYNKDFSAYSKGRPNLHTLYWKALFDERNLQDVVYKLNGEAELFYRKQSIPKKITHPAKEAIANKNKDNPKKESVFEYDLIKDKRFTEDKFFFHCPITINFKSSGANKFNDEINLLLKEKANDVHILSIDRGERHLAYYTLVDGKGNIIKQDTFNIIGNDRMKTNYHDKLAAIEKDRDSARKDWKKINNIKEMKEGYLSQVVHEIAKLVIEYNAIVVFEDLNFGFKRGRFKVEKQVYQKLEKMLIEKLNYLVFKDNEFDKTGGVLRAYQLTAPFETFKKMGKQTGIIYYVPAGFTSKICPVTGFVNQLYPKYESVSKSQEFFSKFDKICYNLDKGYFEFSFDYKNFGDKAAKGKWTIASFGSRLINFRNSDKNHNWDTREVYPTKELEKLLKDYSIEYGHGECIKAAICGESDKKFFAKLTSVLNTILQMRNSKTGTELDYLISPVADVNGNFFDSRQAPKNMPQDADANGAYHIGLKGLMLLGRIKNNQEGKKLNLVIKNEEYFEFVQNRNN

SEQ ID NO: 211 - protein, 1300 aa, Francisella tularensis
  REGION 1..1300: note = MISC_FEATURE - Cpf1 D917A polypeptide sequence
  source 1..1300: note = subspecies novicida
MSIYQEFVNKYSLSKTLRFELIPQGKTLENIKARGLILDDEKRAKDYKKAKQIIDKYHQFFIEEILSSVCISEDLLQNYSDVYFKLKKSDDDNLQKDFKSAKDTIKKQISEYIKDSEKFKNLFNQNLIDAKKGQESDLILWLKQSKDNGIELFKANSDITDIDEALEIIKSFKGWTTYFKGFHENRKNVYSSNDIPTSIIYRIVDDNLPKFLENKAKYESLKDKAPEAINYEQIKKDLAEELTFDIDYKTSEVNQRVFSLDEVFEIANFNNYLNQSGITKFNTIIGGKFVNGENTKRKGINEYINLYSQQINDKTLKKYKMSVLFKQILSDTESKSFVIDKLEDDSDVVTTMQSFYEQIAAFKTVEEKSIKETLSLLFDDLKAQKLDLSKIYFKNDKSLTDLSQQVFDDYSVIGTAVLEYITQQIAPKNLDNPSKKEQELIAKKTEKAKYLSLETIKLALEEFNKHRDIDKQCRFEEILANFAAIPMIFDEIAQNKDNLAQISIKYQNQGKKDLLQASAEDDVKAIKDLLDQTNNLLHKLKIFHISQSEDKANILDKDEHFYLVFEECYFELANIVPLYNKIRNYITQKPYSDEKFKLNFENSTLANGWDKNKEPDNTAILFIKDDKYYLGVMNKKNNKIFDDKAIKENKGEGYKKIVYKLLPGANKMLPKVFFSAKSIKFYNPSEDILRIRNHSTHTKNGSPQKGYEKFEFNIEDCRKFIDFYKQSISKHPEWKDFGFRFSDTQRYNSIDEFYREVENQGYKLTFENISESYIDSVVNQGKLYLFQIYNKDFSAYSKGRPNLHTLYWKALFDERNLQDVVYKLNGEAELFYRKQSIPKKITHPAKEAIANKNKDNPKKESVFEYDLIKDKRFTEDKFFFHCPITINFKSSGANKFNDEINLLLKEKANDVHILSIARGERHLAYYTLVDGKGNIIKQDTFNIIGNDRMKTNYHDKLAAIEKDRDSARKDWKKINNIKEMKEGYLSQVVHEIAKLVIEYNAIVVFEDLNFGFKRGRFKVEKQVYQKLEKMLIEKLNYLVFKDNEFDKTGGVLRAYQLTAPFETFKKMGKQTGIIYYVPAGFTSKICPVTGFVNQLYPKYESVSKSQEFFSKFDKICYNLDKGYFEFSFDYKNFGDKAAKGKWTIASFGSRLINFRNSDKNHNWDTREVYPTKELEKLLKDYSIEYGHGECIKAAICGESDKKFFAKLTSVLNTILQMRNSKTGTELDYLISPVADVNGNFFDSRQAPKNMPQDADANGAYHIGLKGLMLLGRIKNNQEGKKLNLVIKNEEYFEFVQNRNN

SEQ ID NO: 212 - protein, 1300 aa, Francisella tularensis
  REGION 1..1300: note = MISC_FEATURE - Cpf1 E1006A polypeptide sequence
  source 1..1300: note = subspecies novicida
MSIYQEFVNKYSLSKTLRFELIPQGKTLENIKARGLILDDEKRAKDYKKAKQIIDKYHQFFIEEILSSVCISEDLLQNYSDVYFKLKKSDDDNLQKDFKSAKDTIKKQISEYIKDSEKFKNLFNQNLIDAKKGQESDLILWLKQSKDNGIELFKANSDITDIDEALEIIKSFKGWTTYFKGFHENRKNVYSSNDIPTSIIYRIVDDNLPKFLENKAKYESLKDKAPEAINYEQIKKDLAEELTFDIDYKTSEVNQRVFSLDEVFEIANFNNYLNQSGITKFNTIIGGKFVNGENTKRKGINEYINLYSQQINDKTLKKYKMSVLFKQILSDTESKSFVIDKLEDDSDVVTTMQSFYEQIAAFKTVEEKSIKETLSLLFDDLKAQKLDLSKIYFKNDKSLTDLSQQVFDDYSVIGTAVLEYITQQIAPKNLDNPSKKEQELIAKKTEKAKYLSLETIKLALEEFNKHRDIDKQCRFEEILANFAAIPMIFDEIAQNKDNLAQISIKYQNQGKKDLLQASAEDDVKAIKDLLDQTNNLLHKLKIFHISQSEDKANILDKDEHFYLVFEECYFELANIVPLYNKIRNYITQKPYSDEKFKLNFENSTLANGWDKNKEPDNTAILFIKDDKYYLGVMNKKNNKIFDDKAIKENKGEGYKKIVYKLLPGANKMLPKVFFSAKSIKFYNPSEDILRIRNHSTHTKNGSPQKGYEKFEFNIEDCRKFIDFYKQSISKHPEWKDFGFRFSDTQRYNSIDEFYREVENQGYKLTFENISESYIDSVVNQGKLYLFQIYNKDFSAYSKGRPNLHTLYWKALFDERNLQDVVYKLNGEAELFYRKQSIPKKITHPAKEAIANKNKDNPKKESVFEYDLIKDKRFTEDKFFFHCPITINFKSSGANKFNDEINLLLKEKANDVHILSIDRGERHLAYYTLVDGKGNIIKQDTFNIIGNDRMKTNYHDKLAAIEKDRDSARKDWKKINNIKEMKEGYLSQVVHEIAKLVIEYNAIVVFADLNFGFKRGRFKVEKQVYQKLEKMLIEKLNYLVFKDNEFDKTGGVLRAYQLTAPFETFKKMGKQTGIIYYVPAGFTSKICPVTGFVNQLYPKYESVSKSQEFFSKFDKICYNLDKGYFEFSFDYKNFGDKAAKGKWTIASFGSRLINFRNSDKNHNWDTREVYPTKELEKLLKDYSIEYGHGECIKAAICGESDKKFFAKLTSVLNTILQMRNSKTGTELDYLISPVADVNGNFFDSRQAPKNMPQDADANGAYHIGLKGLMLLGRIKNNQEGKKLNLVIKNEEYFEFVQNRNN

SEQ ID NO: 213 - protein, 1300 aa, Francisella tularensis
  REGION 1..1300: note = MISC_FEATURE - Cpf1 D1255A polypeptide sequence
  source 1..1300: note = subspecies novicida
MSIYQEFVNKYSLSKTLRFELIPQGKTLENIKARGLILDDEKRAKDYKKAKQIIDKYHQFFIEEILSSVCISEDLLQNYSDVYFKLKKSDDDNLQKDFKSAKDTIKKQISEYIKDSEKFKNLFNQNLIDAKKGQESDLILWLKQSKDNGIELFKANSDITDIDEALEIIKSFKGWTTYFKGFHENRKNVYSSNDIPTSIIYRIVDDNLPKFLENKAKYESLKDKAPEAINYEQIKKDLAEELTFDIDYKTSEVNQRVFSLDEVFEIANFNNYLNQSGITKFNTIIGGKFVNGENTKRKGINEYINLYSQQINDKTLKKYKMSVLFKQILSDTESKSFVIDKLEDDSDVVTTMQSFYEQIAAFKTVEEKSIKETLSLLFDDLKAQKLDLSKIYFKNDKSLTDLSQQVFDDYSVIGTAVLEYITQQIAPKNLDNPSKKEQELIAKKTEKAKYLSLETIKLALEEFNKHRDIDKQCRFEEILANFAAIPMIFDEIAQNKDNLAQISIKYQNQGKKDLLQASAEDDVKAIKDLLDQTNNLLHKLKIFHISQSEDKANILDKDEHFYLVFEECYFELANIVPLYNKIRNYITQKPYSDEKFKLNFENSTLANGWDKNKEPDNTAILFIKDDKYYLGVMNKKNNKIFDDKAIKENKGEGYKKIVYKLLPGANKMLPKVFFSAKSIKFYNPSEDILRIRNHSTHTKNGSPQKGYEKFEFNIEDCRKFIDFYKQSISKHPEWKDFGFRFSDTQRYNSIDEFYREVENQGYKLTFENISESYIDSVVNQGKLYLFQIYNKDFSAYSKGRPNLHTLYWKALFDERNLQDVVYKLNGEAELFYRKQSIPKKITHPAKEAIANKNKDNPKKESVFEYDLIKDKRFTEDKFFFHCPITINFKSSGANKFNDEINLLLKEKANDVHILSIDRGERHLAYYTLVDGKGNIIKQDTFNIIGNDRMKTNYHDKLAAIEKDRDSARKDWKKINNIKEMKEGYLSQVVHEIAKLVIEYNAIVVFEDLNFGFKRGRFKVEKQVYQKLEKMLIEKLNYLVFKDNEFDKTGGVLRAYQLTAPFETFKKMGKQTGIIYYVPAGFTSKICPVTGFVNQLYPKYESVSKSQEFFSKFDKICYNLDKGYFEFSFDYKNFGDKAAKGKWTIASFGSRLINFRNSDKNHNWDTREVYPTKELEKLLKDYSIEYGHGECIKAAICGESDKKFFAKLTSVLNTILQMRNSKTGTELDYLISPVADVNGNFFDSRQAPKNMPQDAAANGAYHIGLKGLMLLGRIKNNQEGKKLNLVIKNEEYFEFVQNRNN

SEQ ID NO: 214 - protein, 1300 aa, Francisella tularensis
  REGION 1..1300: note = MISC_FEATURE - Cpf1 D917A/E1006A polypeptide sequence
  source 1..1300: note = subspecies novicida
MSIYQEFVNKYSLSKTLRFELIPQGKTLENIKARGLILDDEKRAKDYKKAKQIIDKYHQFFIEEILSSVCISEDLLQNYSDVYFKLKKSDDDNLQKDFKSAKDTIKKQISEYIKDSEKFKNLFNQNLIDAKKGQESDLILWLKQSKDNGIELFKANSDITDIDEALEIIKSFKGWTTYFKGFHENRKNVYSSNDIPTSIIYRIVDDNLPKFLENKAKYESLKDKAPEAINYEQIKKDLAEELTFDIDYKTSEVNQRVFSLDEVFEIANFNNYLNQSGITKFNTIIGGKFVNGENTKRKGINEYINLYSQQINDKTLKKYKMSVLFKQILSDTESKSFVIDKLEDDSDVVTTMQSFYEQIAAFKTVEEKSIKETLSLLFDDLKAQKLDLSKIYFKNDKSLTDLSQQVFDDYSVIGTAVLEYITQQIAPKNLDNPSKKEQELIAKKTEKAKYLSLETIKLALEEFNKHRDIDKQCRFEEILANFAAIPMIFDEIAQNKDNLAQISIKYQNQGKKDLLQASAEDDVKAIKDLLDQTNNLLHKLKIFHISQSEDKANILDKDEHFYLVFEECYFELANIVPLYNKIRNYITQKPYSDEKFKLNFENSTLANGWDKNKEPDNTAILFIKDDKYYLGVMNKKNNKIFDDKAIKENKGEGYKKIVYKLLPGANKMLPKVFFSAKSIKFYNPSEDILRIRNHSTHTKNGSPQKGYEKFEFNIEDCRKFIDFYKQSISKHPEWKDFGFRFSDTQRYNSIDEFYREVENQGYKLTFENISESYIDSVVNQGKLYLFQIYNKDFSAYSKGRPNLHTLYWKALFDERNLQDVVYKLNGEAELFYRKQSIPKKITHPAKEAIANKNKDNPKKESVFEYDLIKDKRFTEDKFFFHCPITINFKSSGANKFNDEINLLLKEKANDVHILSIARGERHLAYYTLVDGKGNIIKQDTFNIIGNDRMKTNYHDKLAAIEKDRDSARKDWKKINNIKEMKEGYLSQVVHEIAKLVIEYNAIVVFADLNFGFKRGRFKVEKQVYQKLEKMLIEKLNYLVFKDNEFDKTGGVLRAYQLTAPFETFKKMGKQTGIIYYVPAGFTSKICPVTGFVNQLYPKYESVSKSQEFFSKFDKICYNLDKGYFEFSFDYKNFGDKAAKGKWTIASFGSRLINFRNSDKNHNWDTREVYPTKELEKLLKDYSIEYGHGECIKAAICGESDKKFFAKLTSVLNTILQMRNSKTGTELDYLISPVADVNGNFFDSRQAPKNMPQDADANGAYHIGLKGLMLLGRIKNNQEGKKLNLVIKNEEYFEFVQNRNN

SEQ ID NO: 215 - protein, 1300 aa, Francisella tularensis
  REGION 1..1300: note = MISC_FEATURE - Cpf1 D917A/D1255A polypeptide sequence
  source 1..1300: note = subspecies novicida
MSIYQEFVNKYSLSKTLRFELIPQGKTLENIKARGLILDDEKRAKDYKKAKQIIDKYHQFFIEEILSSVCISEDLLQNYSDVYFKLKKSDDDNLQKDFKSAKDTIKKQISEYIKDSEKFKNLFNQNLIDAKKGQESDLILWLKQSKDNGIELFKANSDITDIDEALEIIKSFKGWTTYFKGFHENRKNVYSSNDIPTSIIYRIVDDNLPKFLENKAKYESLKDKAPEAINYEQIKKDLAEELTFDIDYKTSEVNQRVFSLDEVFEIANFNNYLNQSGITKFNTIIGGKFVNGENTKRKGINEYINLYSQQINDKTLKKYKMSVLFKQILSDTESKSFVIDKLEDDSDVVTTMQSFYEQIAAFKTVEEKSIKETLSLLFDDLKAQKLDLSKIYFKNDKSLTDLSQQVFDDYSVIGTAVLEYITQQIAPKNLDNPSKKEQELIAKKTEKAKYLSLETIKLALEEFNKHRDIDKQCRFEEILANFAAIPMIFDEIAQNKDNLAQISIKYQNQGKKDLLQASAEDDVKAIKDLLDQTNNLLHKLKIFHISQSEDKANILDKDEHFYLVFEECYFELANIVPLYNKIRNYITQKPYSDEKFKLNFENSTLANGWDKNKEPDNTAILFIKDDKYYLGVMNKKNNKIFDDKAIKENKGEGYKKIVYKLLPGANKMLPKVFFSAKSIKFYNPSEDILRIRNHSTHTKNGSPQKGYEKFEFNIEDCRKFIDFYKQSISKHPEWKDFGFRFSDTQRYNSIDEFYREVENQGYKLTFENISESYIDSVVNQGKLYLFQIYNKDFSAYSKGRPNLHTLYWKALFDERNLQDVVYKLNGEAELFYRKQSIPKKITHPAKEAIANKNKDNPKKESVFEYDLIKDKRFTEDKFFFHCPITINFKSSGANKFNDEINLLLKEKANDVHILSIARGERHLAYYTLVDGKGNIIKQDTFNIIGNDRMKTNYHDKLAAIEKDRDSARKDWKKINNIKEMKEGYLSQVVHEIAKLVIEYNAIVVFEDLNFGFKRGRFKVEKQVYQKLEKMLIEKLNYLVFKDNEFDKTGGVLRAYQLTAPFETFKKMGKQTGIIYYVPAGFTSKICPVTGFVNQLYPKYESVSKSQEFFSKFDKICYNLDKGYFEFSFDYKNFGDKAAKGKWTIASFGSRLINFRNSDKNHNWDTREVYPTKELEKLLKDYSIEYGHGECIKAAICGESDKKFFAKLTSVLNTILQMRNSKTGTELDYLISPVADVNGNFFDSRQAPKNMPQDAAANGAYHIGLKGLMLLGRIKNNQEGKKLNLVIKNEEYFEFVQNRNN

SEQ ID NO: 216 - protein, 1300 aa, Francisella tularensis
  REGION 1..1300: note = MISC_FEATURE - Cpf1 E1006A/D1255A polypeptide sequence
  source 1..1300: note = subspecies novicida
MSIYQEFVNKYSLSKTLRFELIPQGKTLENIKARGLILDDEKRAKDYKKAKQIIDKYHQFFIEEILSSVCISEDLLQNYSDVYFKLKKSDDDNLQKDFKSAKDTIKKQISEYIKDSEKFKNLFNQNLIDAKKGQESDLILWLKQSKDNGIELFKANSDITDIDEALEIIKSFKGWTTYFKGFHENRKNVYSSNDIPTSIIYRIVDDNLPKFLENKAKYESLKDKAPEAINYEQIKKDLAEELTFDIDYKTSEVNQRVFSLDEVFEIANFNNYLNQSGITKFNTIIGGKFVNGENTKRKGINEYINLYSQQINDKTLKKYKMSVLFKQILSDTESKSFVIDKLEDDSDVVTTMQSFYEQIAAFKTVEEKSIKETLSLLFDDLKAQKLDLSKIYFKNDKSLTDLSQQVFDDYSVIGTAVLEYITQQIAPKNLDNPSKKEQELIAKKTEKAKYLSLETIKLALEEFNKHRDIDKQCRFEEILANFAAIPMIFDEIAQNKDNLAQISIKYQNQGKKDLLQASAEDDVKAIKDLLDQTNNLLHKLKIFHISQSEDKANILDKDEHFYLVFEECYFELANIVPLYNKIRNYITQKPYSDEKFKLNFENSTLANGWDKNKEPDNTAILFIKDDKYYLGVMNKKNNKIFDDKAIKENKGEGYKKIVYKLLPGANKMLPKVFFSAKSIKFYNPSEDILRIRNHSTHTKNGSPQKGYEKFEFNIEDCRKFIDFYKQSISKHPEWKDFGFRFSDTQRYNSIDEFYREVENQGYKLTFENISESYIDSVVNQGKLYLFQIYNKDFSAYSKGRPNLHTLYWKALFDERNLQDVVYKLNGEAELFYRKQSIPKKITHPAKEAIANKNKDNPKKESVFEYDLIKDKRFTEDKFFFHCPITINFKSSGANKFNDEINLLLKEKANDVHILSIDRGERHLAYYTLVDGKGNIIKQDTFNIIGNDRMKTNYHDKLAAIEKDRDSARKDWKKINNIKEMKEGYLSQVVHEIAKLVIEYNAIVVFADLNFGFKRGRFKVEKQVYQKLEKMLIEKLNYLVFKDNEFDKTGGVLRAYQLTAPFETFKKMGKQTGIIYYVPAGFTSKICPVTGFVNQLYPKYESVSKSQEFFSKFDKICYNLDKGYFEFSFDYKNFGDKAAKGKWTIASFGSRLINFRNSDKNHNWDTREVYPTKELEKLLKDYSIEYGHGECIKAAICGESDKKFFAKLTSVLNTILQMRNSKTGTELDYLISPVADVNGNFFDSRQAPKNMPQDAAANGAYHIGLKGLMLLGRIKNNQEGKKLNLVIKNEEYFEFVQNRNN

SEQ ID NO: 217 - protein, 1300 aa, Francisella tularensis
  REGION 1..1300: note = MISC_FEATURE - Cpf1 D917A/E1006A/D1255A polypeptide sequence
  source 1..1300: note = subspecies novicida
MSIYQEFVNKYSLSKTLRFELIPQGKTLENIKARGLILDDEKRAKDYKKAKQIIDKYHQFFIEEILSSVCISEDLLQNYSDVYFKLKKSDDDNLQKDFKSAKDTIKKQISEYIKDSEKFKNLFNQNLIDAKKGQESDLILWLKQSKDNGIELFKANSDITDIDEALEIIKSFKGWTTYFKGFHENRKNVYSSNDIPTSIIYRIVDDNLPKFLENKAKYESLKDKAPEAINYEQIKKDLAEELTFDIDYKTSEVNQRVFSLDEVFEIANFNNYLNQSGITKFNTIIGGKFVNGENTKRKGINEYINLYSQQINDKTLKKYKMSVLFKQILSDTESKSFVIDKLEDDSDVVTTMQSFYEQIAAFKTVEEKSIKETLSLLFDDLKAQKLDLSKIYFKNDKSLTDLSQQVFDDYSVIGTAVLEYITQQIAPKNLDNPSKKEQELIAKKTEKAKYLSLETIKLALEEFNKHRDIDKQCRFEEILANFAAIPMIFDEIAQNKDNLAQISIKYQNQGKKDLLQASAEDDVKAIKDLLDQTNNLLHKLKIFHISQSEDKANILDKDEHFYLVFEECYFELANIVPLYNKIRNYITQKPYSDEKFKLNFENSTLANGWDKNKEPDNTAILFIKDDKYYLGVMNKKNNKIFDDKAIKENKGEGYKKIVYKLLPGANKMLPKVFFSAKSIKFYNPSEDILRIRNHSTHTKNGSPQKGYEKFEFNIEDCRKFIDFYKQSISKHPEWKDFGFRFSDTQRYNSIDEFYREVENQGYKLTFENISESYIDSVVNQGKLYLFQIYNKDFSAYSKGRPNLHTLYWKALFDERNLQDVVYKLNGEAELFYRKQSIPKKITHPAKEAIANKNKDNPKKESVFEYDLIKDKRFTEDKFFFHCPITINFKSSGANKFNDEINLLLKEKANDVHILSIARGERHLAYYTLVDGKGNIIKQDTFNIIGNDRMKTNYHDKLAAIEKDRDSARKDWKKINNIKEMKEGYLSQVVHEIAKLVIEYNAIVVFADLNFGFKRGRFKVEKQVYQKLEKMLIEKLNYLVFKDNEFDKTGGVLRAYQLTAPFETFKKMGKQTGIIYYVPAGFTSKICPVTGFVNQLYPKYESVSKSQEFFSKFDKICYNLDKGYFEFSFDYKNFGDKAAKGKWTIASFGSRLINFRNSDKNHNWDTREVYPTKELEKLLKDYSIEYGHGECIKAAICGESDKKFFAKLTSVLNTILQMRNSKTGTELDYLISPVADVNGNFFDSRQAPKNMPQDAAANGAYHIGLKGLMLLGRIKNNQEGKKLNLVIKNEEYFEFVQNRNN

SEQ ID NO: 218 - protein, 1052 aa, Staphylococcus aureus
  REGION 1..1052: note = MISC_FEATURE - Exemplary SaCas9 polypeptide sequence
KRNYILGLDIGITSVGYGIIDYETRDVIDAGVRLFKEANVENNEGRRSKRGARRLKRRRRHRIQRVKKLLFDYNLLTDHSELSGINPYEARVKGLSQKLSEEEFSAALLHLAKRRGVHNVNEVEEDTGNELSTKEQISRNSKALEEKYVAELQLERLKKDGEVRGSINRFKTSDYVKEAKQLLKVQKAYHQLDQSFIDTYIDLLETRRTYYEGPGEGSPFGWKDIKEWYEMLMGHCTYFPEELRSVKYAYNADLYNALNDLNNLVITRDENEKLEYYEKFQIIENVFKQKKKPTLKQIAKEILVNEEDIKGYRVTSTGKPEFTNLKVYHDIKDITARKEIIENAELLDQIAKILTIYQSSEDIQEELTNLNSELTQEEIEQISNLKGYTGTHNLSLKAINLILDELWHTNDNQIAIFNRLKLVPKKVDLSQQKEIPTTLVDDFILSPVVKRSFIQSIKVINAIIKKYGLPNDIIIELAREKNSKDAQKMINEMQKRNRQTNERIEEIIRTTGKENAKYLIEKIKLHDMQEGKCLYSLEAIPLEDLLNNPFNYEVDHIIPRSVSFDNSFNNKVLVKQEENSKKGNRTPFQYLSSSDSKISYETFKKHILNLAKGKGRISKTKKEYLLEERDINRFSVQKDFINRNLVDTRYATRGLMNLLRSYFRVNNLDVKVKSINGGFTSFLRRKWKFKKERNKGYKHHAEDALIIANADFIFKEWKKLDKAKKVMENQMFEEKQAESMPEIETEQEYKEIFITPHQIKHIKDFKDYKYSHRVDKKPNRELINDTLYSTRKDDKGNTLIVNNLNGLYDKDNDKLKKLINKSPEKLLMYHHDPQTYQKLKLIMEQYGDEKNPLYKYYEETGNYLTKYSKKDNGPVIKKIKYYGNKLNAHLDITDDYPNSRNKVVKLSLKPYRFDVYLDNGVYKFVTVKNLDVIKKENYYEVNSKCYEEAKKLKKISNQAEFIASFYNNDLIKINGELYRVIGVNNDLLNRIEVNMIDITYREYLENMNDKRPPRIIKTIASKTQSIKKYSTDILGNLYEVKSKKHPQIIKKG

SEQ ID NO: 219 - protein, 1052 aa, Staphylococcus aureus
  REGION 1..1052: note = MISC_FEATURE - SaCas9n polypeptide sequence
KRNYILGLDIGITSVGYGIIDYETRDVIDAGVRLFKEANVENNEGRRSKRGARRLKRRRRHRIQRVKKLLFDYNLLTDHSELSGINPYEARVKGLSQKLSEEEFSAALLHLAKRRGVHNVNEVEEDTGNELSTKEQISRNSKALEEKYVAELQLERLKKDGEVRGSINRFKTSDYVKEAKQLLKVQKAYHQLDQSFIDTYIDLLETRRTYYEGPGEGSPFGWKDIKEWYEMLMGHCTYFPEELRSVKYAYNADLYNALNDLNNLVITRDENEKLEYYEKFQIIENVFKQKKKPTLKQIAKEILVNEEDIKGYRVTSTGKPEFTNLKVYHDIKDITARKEIIENAELLDQIAKILTIYQSSEDIQEELTNLNSELTQEEIEQISNLKGYTGTHNLSLKAINLILDELWHTNDNQIAIFNRLKLVPKKVDLSQQKEIPTTLVDDFILSPVVKRSFIQSIKVINAIIKKYGLPNDIIIELAREKNSKDAQKMINEMQKRNRQTNERIEEIIRTTGKENAKYLIEKIKLHDMQEGKCLYSLEAIPLEDLLNNPFNYEVDHIIPRSVSFDNSFNNKVLVKQEEASKKGNRTPFQYLSSSDSKISYETFKKHILNLAKGKGRISKTKKEYLLEERDINRFSVQKDFINRNLVDTRYATRGLMNLLRSYFRVNNLDVKVKSINGGFTSFLRRKWKFKKERNKGYKHHAEDALIIANADFIFKEWKKLDKAKKVMENQMFEEKQAESMPEIETEQEYKEIFITPHQIKHIKDFKDYKYSHRVDKKPNRELINDTLYSTRKDDKGNTLIVNNLNGLYDKDNDKLKKLINKSPEKLLMYHHDPQTYQKLKLIMEQYGDEKNPLYKYYEETGNYLTKYSKKDNGPVIKKIKYYGNKLNAHLDITDDYPNSRNKVVKLSLKPYRFDVYLDNGVYKFVTVKNLDVIKKENYYEVNSKCYEEAKKLKKISNQAEFIASFYNNDLIKINGELYRVIGVNNDLLNRIEVNMIDITYREYLENMNDKRPPRIIKTIASKTQSIKKYSTDILGNLYEVKSKKHPQIIKKG

SEQ ID NO: 220 - protein, 1052 aa, Staphylococcus aureus
  REGION 1..1052: note = MISC_FEATURE - SaKKH Cas9 polypeptide sequence
KRNYILGLDIGITSVGYGIIDYETRDVIDAGVRLFKEANVENNEGRRSKRGARRLKRRRRHRIQRVKKLLFDYNLLTDHSELSGINPYEARVKGLSQKLSEEEFSAALLHLAKRRGVHNVNEVEEDTGNELSTKEQISRNSKALEEKYVAELQLERLKKDGEVRGSINRFKTSDYVKEAKQLLKVQKAYHQLDQSFIDTYIDLLETRRTYYEGPGEGSPFGWKDIKEWYEMLMGHCTYFPEELRSVKYAYNADLYNALNDLNNLVITRDENEKLEYYEKFQIIENVFKQKKKPTLKQIAKEILVNEEDIKGYRVTSTGKPEFTNLKVYHDIKDITARKEIIENAELLDQIAKILTIYQSSEDIQEELTNLNSELTQEEIEQISNLKGYTGTHNLSLKAINLILDELWHTNDNQIAIFNRLKLVPKKVDLSQQKEIPTTLVDDFILSPVVKRSFIQSIKVINAIIKKYGLPNDIIIELAREKNSKDAQKMINEMQKRNRQTNERIEEIIRTTGKENAKYLIEKIKLHDMQEGKCLYSLEAIPLEDLLNNPFNYEVDHIIPRSVSFDNSFNNKVLVKQEEASKKGNRTPFQYLSSSDSKISYETFKKHILNLAKGKGRISKTKKEYLLEERDINRFSVQKDFINRNLVDTRYATRGLMNLLRSYFRVNNLDVKVKSINGGFTSFLRRKWKFKKERNKGYKHHAEDALIIANADFIFKEWKKLDKAKKVMENQMFEEKQAESMPEIETEQEYKEIFITPHQIKHIKDFKDYKYSHRVDKKPNRKLINDTLYSTRKDDKGNTLIVNNLNGLYDKDNDKLKKLINKSPEKLLMYHHDPQTYQKLKLIMEQYGDEKNPLYKYYEETGNYLTKYSKKDNGPVIKKIKYYGNKLNAHLDITDDYPNSRNKVVKLSLKPYRFDVYLDNGVYKFVTVKNLDVIKKENYYEVNSKCYEEAKKLKKISNQAEFIASFYKNDLIKINGELYRVIGVNNDLLNRIEVNMIDITYREYLENMNDKRPPHIIKTIASKTQSIKKYSTDILGNLYEVKSKKHPQIIKKG

SEQ ID NO: 221 - protein, 707 aa, synthetic construct
  REGION 1..707: note = Casphi-1 polypeptide sequence
MADTPTLFTQFLRHHLPGQRFRKDILKQAGRILANKGEDATIAFLRGKSEESPPDFQPPVKCPIIACSRPLTEWPIYQASVAIQGYVYGQSLAEFEASDPGCSKDGLLGWFDKTGVCTDYFSVQGLNLIFQNARKRYIGVQTKVTNRNEKRHKKLKRINAKRIAEGLPELTSDEPESALDETGHLIDPPGLNTNIYCYQQVSPKPLALSEVNQLPTAYAGYSTSGDDPIQPMVTKDRLSISKGQPGYIPEHQRALLSQKKHRRMRGYGLKARALLVIVRIQDDWAVIDLRSLLRNAYWRRIVQTKEPSTITKLLKLVTGDPVLDATRMVATFTYKPGIVQVRSAKCLKNKQGSKLFSERYLNETVSVTSIDLGSNNLVAVATYRLVNGNTPELLQRFTLPSHLVKDFERYKQAHDTLEDSIQKTAVASLPQGQQTEIRMWSMYGFREAQERVCQELGLADGSIPWNVMTATSTILTDLFLARGGDPKKCMFTSEPKKKKNSKQVLYKIRDRAWAKMYRTLLSKETREAWNKALWGLKRGSPDYARLSKRKEELARRCVNYTISTAEKRAQCGRTIVALEDLNIGFFHGRGKQEPGWVGLFTRKKENRWLMQALHKAFLELAHHRGYHVIEVNPAYTSQTCPVCRHCDPDNRDQHNREAFHCIGCGFRGNADLDVATHNIAMVAITGESLKRARGSVASKTPQPLAAE

SEQ ID NO: 222 - protein, 757 aa, synthetic construct
  REGION 1..757: note = Casphi-2 polypeptide sequence
MPKPAVESEFSKVLKKHFPGERFRSSYMKRGGKILAAQGEEAVVAYLQGKSEEEPPNFQPPAKCHVVTKSRDFAEWPIMKASEAIQRYIYALSTTERAACKPGKSSESHAAWFAATGVSNHGYSHVQGLNLIFDHTLGRYDGVLKKVQLRNEKARARLESINASRADEGLPEIKAEEEEVATNETGHLLQPPGINPSFYVYQTISPQAYRPRDEIVLPPEYAGYVRDPNAPIPLGVVRNRCDIQKGCPGYIPEWQREAGTAISPKTGKAVTVPGLSPKKNKRMRRYWRSEKEKAQDALLVTVRIGTDWVVIDVRGLLRNARWRTIAPKDISLNALLDLFTGDPVIDVRRNIVTFTYTLDACGTYARKWTLKGKQTKATLDKLTATQTVALVAIDLGQTNPISAGISRVTQENGALQCEPLDRFTLPDDLLKDISAYRIAWDRNEEELRARSVEALPEAQQAEVRALDGVSKETARTQLCADFGLDPKRLPWDKMSSNTTFISEALLSNSVSRDQVFFTPAPKKGAKKKAPVEVMRKDRTWARAYKPRLSVEAQKLKNEALWALKRTSPEYLKLSRRKEELCRRSINYVIEKTRRRTQCQIVIPVIEDLNVRFFHGSGKRLPGWDNFFTAKKENRWFIQGLHKAFSDLRTHRSFYVFEVRPERTSITCPKCGHCEVGNRDGEAFQCLSCGKTCNADLDVATHNLTQVALTGKTMPKREEPRDAQGTAPARKTKKASKSKAPPAEREDQTPAQEPSQTS

SEQ ID NO: 223 - protein, 766 aa, synthetic construct
  REGION 1..766: note = Casphi-3 polypeptide sequence
MEKEITELTKIRREFPNKKFSSTDMKKAGKLLKAEGPDAVRDFLNSCQEIIGDFKPPVKTNIVSISRPFEEWPVSMVGRAIQEYYFSLTKEELESVHPGTSSEDHKSFFNITGLSNYNYTSVQGLNLIFKNAKAIYDGTLVKANNKNKKLEKKFNEINHKRSLEGLPIITPDFEEPFDENGHLNNPPGINRNIYGYQGCAAKVFVPSKHKMVSLPKEYEGYNRDPNLSLAGFRNRLEIPEGEPGHVPWFQRMDIPEGQIGHVNKIQRFNFVHGKNSGKVKFSDKTGRVKRYHHSKYKDATKPYKFLEESKKVSALDSILAIITIGDDWVVFDIRGLYRNVFYRELAQKGLTAVQLLDLFTGDPVIDPKKGVVTFSYKEGVVPVFSQKIVPRFKSRDTLEKLTSQGPVALLSVDLGQNEPVAARVCSLKNINDKITLDNSCRISFLDDYKKQIKDYRDSLDELEIKIRLEAINSLETNQQVEIRDLDVFSADRAKANTVDMFDIDPNLISWDSMSDARVSTQISDLYLKNGGDESRVYFEINNKRIKRSDYNISQLVRPKLSDSTRKNLNDSIWKLKRTSEEYLKLSKRKLELSRAVVNYTIRQSKLLSGINDIVIILEDLDVKKKFNGRGIRDIGWDNFFSSRKENRWFIPAFHKAFSELSSNRGLCVIEVNPAWTSATCPDCGFCSKENRDGINFTCRKCGVSYHADIDVATLNIARVAVLGKPMSGPADRERLGDTKKPRVARSRKTMKRKDISNSTVEAMVTA

SEQ ID NO: 224 - protein, 765 aa, synthetic construct
  REGION 1..765: note = Casphi-4 polypeptide sequence
MYSLEMADLKSEPSLLAKLLRDRFPGKYWLPKYWKLAEKKRLTGGEEAACEYMADKQLDSPPPNFRPPARCVILAKSRPFEDWPVHRVASKAQSFVIGLSEQGFAALRAAPPSTADARRDWLRSHGASEDDLMALEAQLLETIMGNAISLHGGVLKKIDNANVKAAKRLSGRNEARLNKGLQELPPEQEGSAYGADGLLVNPPGLNLNIYCRKSCCPKPVKNTARFVGHYPGYLRDSDSILISGTMDRLTIIEGMPGHIPAWQREQGLVKPGGRRRRLSGSESNMRQKVDPSTGPRRSTRSGTVNRSNQRTGRNGDPLLVEIRMKEDWVLLDARGLLRNLRWRESKRGLSCDHEDLSLSGLLALFSGDPVIDPVRNEVVFLYGEGIIPVRSTKPVGTRQSKKLLERQASMGPLTLISCDLGQTNLIAGRASAISLTHGSLGVRSSVRIELDPEIIKSFERLRKDADRLETEILTAAKETLSDEQRGEVNSHEKDSPQTAKASLCRELGLHPPSLPWGQMGPSTTFIADMLISHGRDDDAFLSHGEFPTLEKRKKFDKRFCLESRPLLSSETRKALNESLWEVKRTSSEYARLSQRKKEMARRAVNFVVEISRRKTGLSNVIVNIEDLNVRIFHGGGKQAPGWDGFFRPKSENRWFIQAIHKAFSDLAAHHGIPVIESDPQRTSMTCPECGHCDSKNRNGVRFLCKGCGASMDADFDAACRNLERVALTGKPMPKPSTSCERLLSATTGKVCSDHSLSHDAIEKAS

SEQ ID NO: 225 - protein, 793 aa, synthetic construct
  REGION 1..793: note = Casphi-5 polypeptide sequence
MSSLPTPLELLKQKHADLFKGLQFSSKDNKMAGKVLKKDGEEAALAFLSERGVSRGELPNFRPPAKTLVVAQSRPFEEFPIYRVSEAIQLYVYSLSVKELETVPSGSSTKKEHQRFFQDSSVPDFGYTSVQGLNKIFGLARGIYLGVITRGENQLQKAKSKHEALNKKRRASGEAETEFDPTPYEYMTPERKLAKPPGVNHSIMCYVDISVDEFDFRNPDGIVLPSEYAGYCREINTAIEKGTVDRLGHLKGGPGYIPGHQRKESTTEGPKINFRKGRIRRSYTALYAKRDSRRVRQGKLALPSYRHHMMRLNSNAESAILAVIFFGKDWVVFDLRGLLRNVRWRNLFVDGSTPSTLLGMFGDPVIDPKRGVVAFCYKEQIVPVVSKSITKMVKAPELLNKLYLKSEDPLVLVAIDLGQTNPVGVGVYRVMNASLDYEVVTRFALESELLREIESYRQRTNAFEAQIRAETFDAMTSEEQEEITRVRAFSASKAKENVCHRFGMPVDAVDWATMGSNTIHIAKWVMRHGDPSLVEVLEYRKDNEIKLDKNGVPKKVKLTDKRIANLTSIRLRFSQETSKHYNDTMWELRRKHPVYQKLSKSKADFSRRVVNSIIRRVNHLVPRARIVFIIEDLKNLGKVFHGSGKRELGWDSYFEPKSENRWFIQVLHKAFSETGKHKGYYIIECWPNWTSCTCPKCSCCDSENRHGEVFRCLACGYTCNTDFGTAPDNLVKIATTGKGLPGPKKRCKGSSKGKNPKIARSSETGVSVTESGAPKVKKSSPTQTSQSSSQSAP

SEQ ID NO: 226 - protein, 441 aa, synthetic construct
  REGION 1..441: note = Casphi-6 polypeptide sequence
MNKIEKEKTPLAKLMNENFAGLRFPFAIIKQAGKKLLKEGELKTIEYMTGKGSIEPLPNFKPPVKCLIVAKRRDLKYFPICKASCEIQSYVYSLNYKDFMDYFSTPMTSQKQHEEFFKKSGLNIEYQNVAGLNLIFNNVKNTYNGVILKVKNRNEKLKKKAIKNNYEFEEIKTFNDDGCLINKPGINNVIYCFQSISPKILKNITHLPKEYNDYDCSVDRNIIQKYVSRLDIPESQPGHVPEWQRKLPEFNNTNNPRRRRKWYSNGRNISKGYSVDQVNQAKIEDSLLAQIKIGEDWIILDIRGLLRDLNRRELISYKNKLTIKDVLGFFSDYPIIDIKKNLVTFCYKEGVIQVVSQKSIGNKKSKQLLEKLIENKPIALVSIDLGQTNPVSVKISKLNKINNKISIESFTYRFLNEEILKEIEKYRKDYDKLELKLINEA

SEQ ID NO: 227 - protein, 772 aa, synthetic construct
  REGION 1..772: note = Casphi-7 polypeptide sequence
MSNTAVSTREHMSNKTTPPSPLSLLLRAHFPGLKFESQDYKIAGKKLRDGGPEAVISYLTGKGQAKLKDVKPPAKAFVIAQSRPFIEWDLVRVSRQIQEKIFGIPATKGRPKQDGLSETAFNEAVASLEVDGKSKLNEETRAAFYEVLGLDAPSLHAQAQNALIKSAISIREGVLKKVENRNEKNLSKTKRRKEAGEEATFVEEKAHDERGYLIHPPGVNQTIPGYQAVVIKSCPSDFIGLPSGCLAKESAEALTDYLPHDRMTIPKGQPGYVPEWQHPLLNRRKNRRRRDWYSASLNKPKATCSKRSGTPNRKNSRTDQIQSGRFKGAIPVLMRFQDEWVIIDIRGLLRNARYRKLLKEKSTIPDLLSLFTGDPSIDMRQGVCTFIYKAGQACSAKMVKTKNAPEILSELTKSGPVVLVSIDLGQTNPIAAKVSRVTQLSDGQLSHETLLRELLSNDSSDGKEIARYRVASDRLRDKLANLAVERLSPEHKSEILRAKNDTPALCKARVCAALGLNPEMIAWDKMTPYTEFLATAYLEKGGDRKVATLKPKNRPEMLRRDIKFKGTEGVRIEVSPEAAEAYREAQWDLQRTSPEYLRLSTWKQELTKRILNQLRHKAAKSSQCEVVVMAFEDLNIKMMHGNGKWADGGWDAFFIKKRENRWFMQAFHKSLTELGAHKGVPTIEVTPHRTSITCTKCGHCDKANRDGERFACQKCGFVAHADLEIATDNIERVALTGKPMPKPESERSGDAKKSVGARKAAFKPEEDAEAAE

SEQ ID NO: 228 - protein, 717 aa, synthetic construct
  REGION 1..717: note = Casphi-8 polypeptide sequence
MIKPTVSQFLTPGFKLIRNHSRTAGLKLKNEGEEACKKFVRENEIPKDECPNFQGGPAIANIIAKSREFTEWEIYQSSLAIQEVIFTLPKDKLPEPILKEEWRAQWLSEHGLDTVPYKEAAGLNLIIKNAVNTYKGVQVKVDNKNKNNLAKINRKNEIAKLNGEQEISFEEIKAFDDKGYLLQKPSPNKSIYCYQSVSPKPFITSKYHNVNLPEEYIGYYRKSNEPIVSPYQFDRLRIPIGEPGYVPKWQYTFLSKKENKRRKLSKRIKNVSPILGIICIKKDWCVFDMRGLLRTNHWKKYHKPTDSINDLFDYFTGDPVIDTKANVVRFRYKMENGIVNYKPVREKKGKELLENICDQNGSCKLATVDVGQNNPVAIGLFELKKVNGELTKTLISRHPTPIDFCNKITAYRERYDKLESSIKLDAIKQLTSEQKIEVDNYNNNFTPQNTKQIVCSKLNINPNDLPWDKMISGTHFISEKAQVSNKSEIYFTSTDKGKTKDVMKSDYKWFQDYKPKLSKEVRDALSDIEWRLRRESLEFNKLSKSREQDARQLANWISSMCDVIGIENLVKKNNFFGGSGKREPGWDNFYKPKKENRWWINAIHKALTELSQNKGKRVILLPAMRTSITCPKCKYCDSKNRNGEKFNCLKCGIELNADIDVATENLATVAITAQSMPKPTCERSGDAKKPVRARKAKAPEFHDKLAPSYTVVLREAV

SEQ ID NO: 229 - protein, 793 aa, synthetic construct
  REGION 1..793: note = Casphi-9 polypeptide sequence
MRSSREIGDKILMRQPAEKTAFQVFRQEVIGTQKLSGGDAKTAGRLYKQGKMEAAREWLLKGARDDVPPNFQPPAKCLVVAVSHPFEEWDISKTNHDVQAYIYAQPLQAEGHLNGLSEKWEDTSADQHKLWFEKTGVPDRGLPVQAINKIAKAAVNRAFGVVRKVENRNEKRRSRDNRIAEHNRENGLTEVVREAPEVATNADGFLLHPPGIDPSILSYASVSPVPYNSSKHSFVRLPEEYQAYNVEPDAPIPQFVVEDRFAIPPGQPGYVPEWQRLKCSTNKHRRMRQWSNQDYKPKAGRRAKPLEFQAHLTRERAKGALLVVMRIKEDWVVFDVRGLLRNVEWRKVLSEEAREKLTLKGLLDLFTGDPVIDTKRGIVTFLYKAEITKILSKRTVKTKNARDLLLRLTEPGEDGLRREVGLVAVDLGQTHPIAAAIYRIGRTSAGALESTVLHRQGLREDQKEKLKEYRKRHTALDSRLRKEAFETLSVEQQKEIVTVSGSGAQITKDKVCNYLGVDPSTLPWEKMGSYTHFISDDFLRRGGDPNIVHFDRQPKKGKVSKKSQRIKRSDSQWVGRMRPRLSQETAKARMEADWAAQNENEEYKRLARSKQELARWCVNTLLQNTRCITQCDEIVVVIEDLNVKSLHGKGAREPGWDNFFTPKTENRWFIQILHKTFSELPKHRGEHVIEGCPLRTSITCPACSYCDKNSRNGEKFVCVACGATFHADFEVATYNLVRLATTGMPMPKSLERQGGGEKAGGARKARKKAKQVEKIVVQANANVTMNGASLHSP

SEQ ID NO: 230 - protein, 812 aa, synthetic construct
  REGION 1..812: note = Casphi-10 polypeptide sequence
MDMLDTETNYATETPAQQQDYSPKPPKKAQRAPKGFSKKARPEKKPPKPITLFTQKHFSGVRFLKRVIRDASKILKLSESRTITFLEQAIERDGSAPPDVTPPVHNTIMAVTRPFEEWPEVILSKALQKHCYALTKKIKIKTWPKKGPGKKCLAAWSARTKIPLIPGQVQATNGLFDRIGSIYDGVEKKVTNRNANKKLEYDEAIKEGRNPAVPEYETAYNIDGTLINKPGYNPNLYITQSRTPRLITEADRPLVEKILWQMVEKKTQSRNQARRARLEKAAHLQGLPVPKFVPEKVDRSQKIEIRIIDPLDKIEPYMPQDRMAIKASQDGHVPYWQRPFLSKRRNRRVRAGWGKQVSSIQAWLTGALLVIVRLGNEAFLADIRGALRNAQWRKLLKPDATYQSLFNLFTGDPVVNTRTNHLTMAYREGVVNIVKSRSFKGRQTREHLLTLLGQGKTVAGVSFDLGQKHAAGLLAAHFGLGEDGNPVFTPIQACFLPQRYLDSLTNYRNRYDALTLDMRRQSLLALTPAQQQEFADAQRDPGGQAKRACCLKLNLNPDEIRWDLVSGISTMISDLYIERGGDPRDVHQQVETKPKGKRKSEIRILKIRDGKWAYDFRPKIADETRKAQREQLWKLQKASSEFERLSRYKINIARAIANWALQWGRELSGCDIVIPVLEDLNVGSKFFDGKGKWLLGWDNRFTPKKENRWFIKVLHKAVAELAPHRGVPVYEVMPHRTSMTCPACHYCHPTNREGDRFECQSCHVVKNTDRDVAPYNILRVAVEGKTLDRWQAEKKPQAEPDRPMILIDNQES

SEQ ID NO: 231 - protein, 84 aa, synthetic construct
  REGION 1..84: note = synthetic polypeptide sequence
MTNLSDIIEKETGKQLVIQESILMLPEEVEEVIGNKPESDILVHTAYDESTDENVMLLTSDAPEYKPWALVIQDSNGENKIKML

SEQ ID NO: 232 - protein, 1129 aa, Alicyclobacillus acidoterrestris
  REGION 1..1129: note = MISC_FEATURE - Cas12b/C2c1; sp|T0D7A2|C2C1_ALIAG CRISPR-associated endonuclease C2c1 OS = Alicyclobacillus acido-terrestris (strain ATCC 49025 /DSM 3922/ CIP 106132 / NCIMB 13137/GD3B) GN=c2c1 PE=1 SV=1; Cas12b/C2c1 polypeptide sequence
MAVKSIKVKLRLDDMPEIRAGLWKLHKEVNAGVRYYTEWLSLLRQENLYRRSPNGDGEQECDKTAEECKAELLERLRARQVENGHRGPAGSDDELLQLARQLYELLVPQAIGAKGDAQQIARKFLSPLADKDAVGGLGIAKAGNKPRWVRMREAGEPGWEEEKEKAETRKSADRTADVLRALADFGLKPLMRVYTDSEMSSVEWKPLRKGQAVRTWDRDMFQQAIERMMSWESWNQRVGQEYAKLVEQKNRFEQKNFVGQEHLVHLVNQLQQDMKEASPGLESKEQTAHYVTGRALRGSDKVFEKWGKLAPDAPFDLYDAEIKNVQRRNTRRFGSHDLFAKLAEPEYQALWREDASFLTRYAVYNSILRKLNHAKMFATFTLPDATAHPIWTRFDKLGGNLHQYTFLFNEFGERRHAIRFHKLLKVENGVAREVDDVTVPISMSEQLDNLLPRDPNEPIALYFRDYGAEQHFTGEFGGAKIQCRRDQLAHMHRRRGARDVYLNVSVRVQSQSEARGERRPPYAAVFRLVGDNHRAFVHFDKLSDYLAEHPDDGKLGSEGLLSGLRVMSVDLGLRTSASISVFRVARKDELKPNSKGRVPFFFPIKGNDNLVAVHERSQLLKLPGETESKDLRAIREERQRTLRQLRTQLAYLRLLVRCGSEDVGRRERSWAKLIEQPVDAANHMTPDWREAFENELQKLKSLHGICSDKEWMDAVYESVRRVWRHMGKQVRDWRKDVRSGERPKIRGYAKDVVGGNSIEQIEYLERQYKFLKSWSFFGKVSGQVIRAEKGSRFAITLREHIDHAKEDRLKKLADRIIMEALGYVYALDERGKGKWVAKYPPCQLILLEELSEYQFNNDRPPSENNQLMQWSHRGVFQELINQAQVHDLLVGTMYAAFSSRFDARTGAPGIRCRRVPARCTQEHNPEPFPWWLNKFVVEHTLDACPLRADDLIPTGEGEIFVSPFSAEEGDFHQIHADLNAAQNLQQRLWSDFDISQIRLRCDWGEVDGELVLIPRLTGKRTADSYSNKVFYTNTGVTYYERERGKKRRKVFAQEKLSEEEAELLVEADEAREKSVVLMRDPSGIINRGNWTRQKEFWSMVNQRIEGYLVKQIRSRVPLQDSACENTGDI

SEQ ID NO: 233 - protein, 1368 aa, Mus musculus
  REGION 1..1368: note = MISC_FEATURE - high fidelity Cas9 polypeptide sequence
MDKKYSIGLAIGTNSVGWAVITDEYKVPSKKFKVLGNTDRHSIKKNLIGALLFDSGETAEATRLKRTARRRYTRRKNRICYLQEIFSNEMAKVDDSFFHRLEESFLVEEDKKHERHPIFGNIVDEVAYHEKYPTIYHLRKKLVDSTDKADLRLIYLALAHMIKFRGHFLIEGDLNPDNSDVDKLFIQLVQTYNQLFEENPINASGVDAKAILSARLSKSRRLENLIAQLPGEKKNGLFGNLIALSLGLTPNFKSNFDLAEDAKLQLSKDTYDDDLDNLLAQIGDQYADLFLAAKNLSDAILLSDILRVNTEITKAPLSASMIKRYDEHHQDLTLLKALVRQQLPEKYKEIFFDQSKNGYAGYIDGGASQEEFYKFIKPILEKMDGTEELLVKLNREDLLRKQRTFDNGSIPHQIHLGELHAILRRQEDFYPFLKDNREKIEKILTFRIPYYVGPLARGNSRFAWMTRKSEETITPWNFEEVVDKGASAQSFIERMTAFDKNLPNEKVLPKHSLLYEYFTVYNELTKVKYVTEGMRKPAFLSGEQKKAIVDLLFKTNRKVTVKQLKEDYFKKIECFDSVEISGVEDRFNASLGTYHDLLKIIKDKDFLDNEENEDILEDIVLTLTLFEDREMIEERLKTYAHLFDDKVMKQLKRRRYTGWGALSRKLINGIRDKQSGKTILDFLKSDGFANRNFMALIHDDSLTFKEDIQKAQVSGQGDSLHEHIANLAGSPAIKKGILQTVKVVDELVKVMGRHKPENIVIEMARENQTTQKGQKNSRERMKRIEEGIKELGSQILKEHPVENTQLQNEKLYLYYLQNGRDMYVDQELDINRLSDYDVDHIVPQSFLKDDSIDNKVLTRSDKNRGKSDNVPSEEVVKKMKNYWRQLLNAKLITQRKFDNLTKAERGGLSELDKAGFIKRQLVETRAITKHVAQILDSRMNTKYDENDKLIREVKVITLKSKLVSDFRKDFQFYKVREINNYHHAHDAYLNAVVGTALIKKYPKLESEFVYGDYKVYDVRKMIAKSEQEIGKATAKYFFYSNIMNFFKTEITLANGEIRKRPLIETNGETGEIVWDKGRDFATVRKVLSMPQVNIVKKTEVQTGGFSKESILPKRNSDKLIARKKDWDPKKYGGFDSPTVAYSVLVVAKVEKGKSKKLKSVKELLGITIMERSSFEKNPIDFLEAKGYKEVKKDLIIKLPKYSLFELENGRKRMLASAGELQKGNELALPSKYVNFLYLASHYEKLKGSPEDNEQKQLFVEQHKHYLDEIIEQISEFSKRVILADANLDKVLSAYNKHRDKPIREQAENIIHLFTLTNLGAPAAFKYFDTTIDRKRYTSTKEVLDATLIHQSITGLYETRIDLSQLGGD

SEQ ID NO: 234 - protein, 1368 aa, Streptococcus pyogenes
  REGION 1..1368: note = MISC_FEATURE - PAM-binding SpEQR Cas9 polypeptide sequence
MDKKYSIGLAIGTNSVGWAVITDEYKVPSKKFKVLGNTDRHSIKKNLIGALLFDSGETAEATRLKRTARRRYTRRKNRICYLQEIFSNEMAKVDDSFFHRLEESVLVEEDKKHERHPIFGNIVDEVAYHEKYPTIYHLRKKLVDSTDKADLRLIYLALAHMIKFRGHFLIEGDLNPDNSDVDKLFIQLVQTYNQLFEENPINASGVDAKAILSARLSKSRRLENLIAQLPGEKKNGLFGNLIALSLGLTPNFKSNFDLAEDAKLQLSKDTYDDDLDNLLAQIGDQYADLFLAAKNLSDAILLSDILRVNTEITKAPLSASMIKRYDEHHQDLTLLKALVRQQLPEKYKEIFFDQSKNGYAGYIDGGASQEEFYKFIKPILEKMDGTEELLVKLNREDLLRKQRTFDNGSIPHQIHLGELHAILRRQEDFYPFLKDNREKIEKILTFRIPYYVGPLARGNSRFAWMTRKSEETITPWNFEEVVDKGASAQSFIERMTNFDKNLPNEKVLPKHSLLYEYFTVYNELTKVKYVTEGMRKPAFLSGEQKKAIVDLLFKTNRKVTVKQLKEDYFKKIECFDSVEISGVEDRFNASLGTYHDLLKIIKDKDFLDNEENEDILEDIVLTLTLFEDREMIEERLKTYAHLFDDKVMKQLKRRRYTGWGRLSRKLINGIRDKQSGKTILDFLKSDGFANRNFMQLIHDDSLTFKEDIQKAQVSGQGDSLHEHIANLAGSPAIKKGILQTVKVVDELVKVMGRHKPENIVIEMARENQTTQKGQKNSRERMKRIEEGIKELGSQILKEHPVENTQLQNEKLYLYYLQNGRDMYVDQELDINRLSDYDVDHIVPQSFLKDDSIDNKVLTRSDKNRGKSDNVPSEEVVKKMKNYWRQLLNAKLITQRKFDNLTKAERGGLSELDKAGFIKRQLVETRQITKHVAQILDSRMNTKYDENDKLIREVKVITLKSKLVSDFRKDFQFYKVREINNYHHAHDAYLNAVVGTALIKKYPKLESEFVYGDYKVYDVRKMIAKSEQEIGKATAKYFFYSNIMNFFKTEITLANGEIRKRPLIETNGETGEIVWDKGRDFATVRKVLSMPQVNIVKKTEVQTGGFSKESILPKRNSDKLIARKKDWDPKKYGGFESPTVAYSVLVVAKVEKGKSKKLKSVKELLGITIMERSSFEKNPIDFLEAKGYKEVKKDLIIKLPKYSLFELENGRKRMLASAGELQKGNELALPSKYVNFLYLASHYEKLKGSPEDNEQKQLFVEQHKHYLDEIIEQISEFSKRVILADANLDKVLSAYNKHRDKPIREQAENIIHLFTLTNLGAPAAFKYFDTTIDRKQYRSTKEVLDATLIHQSITGLYETRIDLSQLGGD

SEQ ID NO: 235 - protein, 1368 aa, Streptococcus pyogenes
  REGION 1..1368: note = MISC_FEATURE - PAM-binding SpVQR Cas9 polypeptide sequence
MDKKYSIGLAIGTNSVGWAVITDEYKVPSKKFKVLGNTDRHSIKKNLIGALLFDSGETAEATRLKRTARRRYTRRKNRICYLQEIFSNEMAKVDDSFFHRLEESFLVEEDKKHERHPIFGNIVDEVAYHEKYPTIYHLRKKLVDSTDKADLRLIYLALAHMIKFRGHFLIEGDLNPDNSDVDKLFIQLVQTYNQLFEENPINASGVDAKAILSARLSKSRRLENLIAQLPGEKKNGLFGNLIALSLGLTPNFKSNFDLAEDAKLQLSKDTYDDDLDNLLAQIGDQYADLFLAAKNLSDAILLSDILRVNTEITKAPLSASMIKRYDEHHQDLTLLKALVRQQLPEKYKEIFFDQSKNGYAGYIDGGASQEEFYKFIKPILEKMDGTEELLVKLNREDLLRKQRTFDNGSIPHQIHLGELHAILRRQEDFYPFLKDNREKIEKILTFRIPYYVGPLARGNSRFAWMTRKSEETITPWNFEEVVDKGASAQSFIERMTNFDKNLPNEKVLPKHSLLYEYFTVYNELTKVKYVTEGMRKPAFLSGEQKKAIVDLLFKTNRKVTVKQLKEDYFKKIECFDSVEISGVEDRFNASLGTYHDLLKIIKDKDFLDNEENEDILEDIVLTLTLFEDREMIEERLKTYAHLFDDKVMKQLKRRRYTGWGRLSRKLINGIRDKQSGKTILDFLKSDGFANRNFMQLIHDDSLTFKEDIQKAQVSGQGDSLHEHIANLAGSPAIKKGILQTVKVVDELVKVMGRHKPENIVIEMARENQTTQKGQKNSRERMKRIEEGIKELGSQILKEHPVENTQLQNEKLYLYYLQNGRDMYVDQELDINRLSDYDVDHIVPQSFLKDDSIDNKVLTRSDKNRGKSDNVPSEEVVKKMKNYWRQLLNAKLITQRKFDNLTKAERGGLSELDKAGFIKRQLVETRQITKHVAQILDSRMNTKYDENDKLIREVKVITLKSKLVSDFRKDFQFYKVREINNYHHAHDAYLNAVVGTALIKKYPKLESEFVYGDYKVYDVRKMIAKSEQEIGKATAKYFFYSNIMNFFKTEITLANGEIRKRPLIETNGETGEIVWDKGRDFATVRKVLSMPQVNIVKKTEVQTGGFSKESILPKRNSDKLIARKKDWDPKKYGGFVSPTVAYSVLVVAKVEKGKSKKLKSVKELLGITIMERSSFEKNPIDFLEAKGYKEVKKDLIIKLPKYSLFELENGRKRMLASAGELQKGNELALPSKYVNFLYLASHYEKLKGSPEDNEQKQLFVEQHKHYLDEIIEQISEFSKRVILADANLDKVLSAYNKHRDKPIREQAENIIHLFTLTNLGAPAAFKYFDTTIDRKQYRSTKEVLDATLIHQSITGLYETRIDLSQLGGD

SEQ ID NO: 236 - protein, 1368 aa, Streptococcus pyogenes
  REGION 1..1368: note = MISC_FEATURE - SpVQR Cas9 polypeptide sequence
MDKKYSIGLAIGTNSVGWAVITDEYKVPSKKFKVLGNTDRHSIKKNLIGALLFDSGETAEATRLKRTARRRYTRRKNRICYLQEIFSNEMAKVDDSFFHRLEESFLVEEDKKHERHPIFGNIVDEVAYHEKYPTIYHLRKKLVDSTDKADLRLIYLALAHMIKFRGHFLIEGDLNPDNSDVDKLFIQLVQTYNQLFEENPINASGVDAKAILSARLSKSRRLENLIAQLPGEKKNGLFGNLIALSLGLTPNFKSNFDLAEDAKLQLSKDTYDDDLDNLLAQIGDQYADLFLAAKNLSDAILLSDILRVNTEITKAPLSASMIKRYDEHHQDLTLLKALVRQQLPEKYKEIFFDQSKNGYAGYIDGGASQEEFYKFIKPILEKMDGTEELLVKLNREDLLRKQRTFDNGSIPHQIHLGELHAILRRQEDFYPFLKDNREKIEKILTFRIPYYVGPLARGNSRFAWMTRKSEETITPWNFEEVVDKGASAQSFIERMTNFDKNLPNEKVLPKHSLLYEYFTVYNELTKVKYVTEGMRKPAFLSGEQKKAIVDLLFKTNRKVTVKQLKEDYFKKIECFDSVEISGVEDRFNASLGTYHDLLKIIKDKDFLDNEENEDILEDIVLTLTLFEDREMIEERLKTYAHLFDDKVMKQLKRRRYTGWGRLSRKLINGIRDKQSGKTILDFLKSDGFANRNFMQLIHDDSLTFKEDIQKAQVSGQGDSLHEHIANLAGSPAIKKGILQTVKVVDELVKVMGRHKPENIVIEMARENQTTQKGQKNSRERMKRIEEGIKELGSQILKEHPVENTQLQNEKLYLYYLQNGRDMYVDQELDINRLSDYDVDHIVPQSFLKDDSIDNKVLTRSDKNRGKSDNVPSEEVVKKMKNYWRQLLNAKLITQRKFDNLTKAERGGLSELDKAGFIKRQLVETRQITKHVAQILDSRMNTKYDENDKLIREVKVITLKSKLVSDFRKDFQFYKVREINNYHHAHDAYLNAVVGTALIKKYPKLESEFVYGDYKVYDVRKMIAKSEQEIGKATAKYFFYSNIMNFFKTEITLANGEIRKRPLIETNGETGEIVWDKGRDFATVRKVLSMPQVNIVKKTEVQTGGFSKESILPKRNSDKLIARKKDWDPKKYGGFVSPTVAYSVLVVAKVEKGKSKKLKSVKELLGITIMERSSFEKNPIDFLEAKGYKEVKKDLIIKLPKYSLFELENGRKRMLASARELQKGNELALPSKYVNFLYLASHYEKLKGSPEDNEQKQLFVEQHKHYLDEIIEQISEFSKRVILADANLDKVLSAYNKHRDKPIREQAENIIHLFTLTNLGAPAAFKYFDTTIDRKEYRSTKEVLDATLIHQSITGLYETRIDLSQLGGD

SEQ ID NO: 237 - protein, 1359 aa, Streptococcus macacae
  REGION 1..1359: note = MISC_FEATURE - SpyMacCas9 polypeptide sequence
MDKKYSIGLDIGTNSVGWAVITDDYKVPSKKFKVLGNTDRHSIKKNLIGALLFGSGETAEATRLKRTARRRYTRRKNRICYLQEIFSNEMAKVDDSFFHRLEESFLVEEDKKHERHPIFGNIVDEVAYHEKYPTIYHLRKKLADSTDKADLRLIYLALAHMIKFRGHFLIEGDLNPDNSDVDKLFIQLVQIYNQLFEENPINASRVDAKAILSARLSKSRRLENLIAQLPGEKRNGLFGNLIALSLGLTPNFKSNFDLAEDAKLQLSKDTYDDDLDNLLAQIGDQYADLFLAAKNLSDAILLSDILRVNSEITKAPLSASMIKRYDEHHQDLTLLKALVRQQLPEKYKEIFFDQSKNGYAGYIDGGASQEEFYKFIKPILEKMDGTEELLVKLNREDLLRKQRTFDNGSIPHQIHLGELHAILRRQEDFYPFLKDNREKIEKILTFRIPYYVGPLARGNSRFAWMTRKSEETITPWNFEEVVDKGASAQSFIERMTNFDKNLPNEKVLPKHSLLYEYFTVYNELTKVKYVTEGMRKPAFLSGEQKKAIVDLLFKTNRKVTVKQLKEDYFKKIECFDSVEISGVEDRFNASLGAYHDLLKIIKDKDFLDNEENEDILEDIVLTLTLFEDRGMIEERLKTYAHLFDDKVMKQLKRRRYTGWGRLSRKLINGIRDKQSGKTILDFLKSDGFANRNFMQLIHDDSLTFKEDIQKAQVSGQGHSLHEQIANLAGSPAIKKGILQTVKIVDELVKVMGHKPENIVIEMARENQTTQKGQKNSRERMKRIEEGIKELGSQILKEHPVENTQLQNEKLYLYYLQNGRDMYVDQELDINRLSDYDVDHIVPQSFIKDDSIDNKVLTRSDKNRGKSDNVPSEEVVKKMKNYWRQLLNAKLITQRKFDNLTKAERGGLSELDKAGFIKRQLVETRQITKHVAQILDSRMNTKYDENDKLIREVKVITLKSKLVSDFRKDFQFYKVREINNYHHAHDAYLNAVVGTALIKKYPKLESEFVYGDYKVYDVRKMIAKSEQEIGKATAKYFFYSNIMNFFKTEITLANGEIRKRPLIETNGETGEIVWDKGRDFATVRKVLSMPQVNIVKKTEIQTVGQNGGLFDDNPKSPLEVTPSKLVPLKKELNPKKYGGYQKPTTAYPVLLITDTKQLIPISVMNKKQFEQNPVKFLRDRGYQQVGKNDFIKLPKYTLVDIGDGIKRLWASSKEIHKGNQLVVSKKSQILLYHAHHLDSDLSNDYLQNHNQQFDVLFNEIISFSKKCKLGKEHIQKIENVYSNKKNSASIEELAESFIKLLGFTQLGATSPFNFLGVKLNQKQYKGKKDYILPCTEGTLIRQSITGLYETRVDLSKIGED

SEQ ID NO: 238 - protein, 1410 aa, synthetic construct
  REGION 1..1410: note = CP5 polypeptide sequence
  REGION 1..341: note = MISC_FEATURE - Sequence derived from Cas9
  REGION 342..362: note = MISC_FEATURE - Linker sequence
  REGION 363..1388: note = MISC_FEATURE - Sequence derived from Cas9
  REGION 1389..1410: note = MISC_FEATURE - Bipartite nuclear localization sequence
EIGKATAKYFFYSNIMNFFKTEITLANGEIRKRPLIETNGETGEIVWDKGRDFATVRKVLSMPQVNIVKKTEVQTGGFSKESILPKRNSDKLIARKKDWDPKKYGGFMQPTVAYSVLVVAKVEKGKSKKLKSVKELLGITIMERSSFEKNPIDFLEAKGYKEVKKDLIIKLPKYSLFELENGRKRMLASAKFLQKGNELALPSKYVNFLYLASHYEKLKGSPEDNEQKQLFVEQHKHYLDEIIEQISEFSKRVILADANLDKVLSAYNKHRDKPIREQAENIIHLFTLTNLGAPRAFKYFDTTIARKEYRSTKEVLDATLIHQSITGLYETRIDLSQLGGDGGSGGSGGSGGSGGSGGSGGMDKKYSIGLAIGTNSVGWAVITDEYKVPSKKFKVLGNTDRHSIKKNLIGALLFDSGETAEATRLKRTARRRYTRRKNRICYLQEIFSNEMAKVDDSFFHRLEESFLVEEDKKHERHPIFGNIVDEVAYHEKYPTIYHLRKKLVDSTDKADLRLIYLALAHMIKFRGHFLIEGDLNPDNSDVDKLFIQLVQTYNQLFEENPINASGVDAKAILSARLSKSRRLENLIAQLPGEKKNGLFGNLIALSLGLTPNFKSNFDLAEDAKLQLSKDTYDDDLDNLLAQIGDQYADLFLAAKNLSDAILLSDILRVNTEITKAPLSASMIKRYDEHHQDLTLLKALVRQQLPEKYKEIFFDQSKNGYAGYIDGGASQEEFYKFIKPILEKMDGTEELLVKLNREDLLRKQRTFDNGSIPHQIHLGELHAILRRQEDFYPFLKDNREKIEKILTFRIPYYVGPLARGNSRFAWMTRKSEETITPWNFEEVVDKGASAQSFIERMTNFDKNLPNEKVLPKHSLLYEYFTVYNELTKVKYVTEGMRKPAFLSGEQKKAIVDLLFKTNRKVTVKQLKEDYFKKIECFDSVEISGVEDRFNASLGTYHDLLKIIKDKDFLDNEENEDILEDIVLTLTLFEDREMIEERLKTYAHLFDDKVMKQLKRRRYTGWGRLSRKLINGIRDKQSGKTILDFLKSDGFANRNFMQLIHDDSLTFKEDIQKAQVSGQGDSLHEHIANLAGSPAIKKGILQTVKVVDELVKVMGRHKPENIVIEMARENQTTQKGQKNSRERMKRIEEGIKELGSQILKEHPVENTQLQNEKLYLYYLQNGRDMYVDQELDINRLSDYDVDHIVPQSFLKDDSIDNKVLTRSDKNRGKSDNVPSEEVVKKMKNYWRQLLNAKLITQRKFDNLTKAERGGLSELDKAGFIKRQLVETRQITKHVAQILDSRMNTKYDENDKLIREVKVITLKSKLVSDFRKDFQFYKVREINNYHHAHDAYLNAVVGTALIKKYPKLESEFVYGDYKVYDVRKMIAKSEQEGADKRTADGSEFESPKKKRKV

SEQ ID NO: 239 - protein, 1302 aa, synthetic construct
  REGION 1..1302: note = Cas12c1 polypeptide sequence
MQTKKTHLHLISAKASRKYRRTIACLSDTAKKDLERRKQSGAADPAQELSCLKTIKFKLEVPEGSKLPSFDRISQIYNALETIEKGSLSYLLFALILSGFRIFPNSSAAKTFASSSCYKNDQFASQIKEIFGEMVKNFIPSELESILKKGRRKNNKDWTEENIKRVLNSEFGRKNSEGSSALFDSFLSKFSQELFRKFDSWNEVNKKYLEAAELLDSMLASYGPFDSVCKMIGDSDSRNSLPDKSTIAFTNNAEITVDIESSVMPYMAIAALLREYRQSKSKAAPVAYVQSHLTTTNGNGLSWFFKFGLDLIRKAPVSSKQSTSDGSKSLQELFSVPDDKLDGLKFIKEACEALPEASLLCGEKGELLGYQDFRTSFAGHIDSWVANYVNRLFELIELVNQLPESIKLPSILTQKNHNLVASLGLQEAEVSHSLELFEGLVKNVRQTLKKLAGIDISSSPNEQDIKEFYAFSDVLNRLGSIRNQIENAVQTAKKDKIDLESAIEWKEWKKLKKLPKLNGLGGGVPKQQELLDKALESVKQIRHYQRIDFERVIQWAVNEHCLETVPKFLVDAEKKKINKESSTDFAAKENAVRFLLEGIGAAARGKTDSVSKAAYNWFVVNNFLAKKDLNRYFINCQGCIYKPPYSKRRSLAFALRSDNKDTIEVVWEKFETFYKEISKEIEKFNIFSQEFQTFLHLENLRMKLLLRRIQKPIPAEIAFFSLPQEYYDSLPPNVAFLALNQEITPSEYITQFNLYSSFLNGNLILLRRSRSYLRAKFSWVGNSKLIYAAKEARLWKIPNAYWKSDEWKMILDSNVLVFDKAGNVLPAPTLKKVCEREGDLRLFYPLLRQLPHDWCYRNPFVKSVGREKNVIEVNKEGEPKVASALPGSLFRLIGPAPFKSLLDDCFFNPLDKDLRECMLIVDQEISQKVEAQKVEASLESCTYSIAVPIRYHLEEPKVSNQFENVLAIDQGEAGLAYAVFSLKSIGEAETKPIAVGTIRIPSIRRLIHSVSTYRKKKQRLQNFKQNYDSTAFIMRENVTGDVCAKIVGLMKEFNAFPVLEYDVKNLESGSRQLSAVYKAVNSHFLYFKEPGRDALRKQLWYGGDSWTIDGIEIVTRERKEDGKEGVEKIVPLKVFPGRSVSARFTSKTCSCCGRNVFDWLFTEKKAKTNKKFNVNSKGELTTADGVIQLFEADRSKGPKFYARRKERTPLTKPIAKGSYSLEEIERRVRTNLRRAPKSKQSRDTSQSQYFCVYKDCALHFSGMQADENAAINIGRRFLTALRKNRRSDFPSNVKISDRLLDN

SEQ ID NO: 240 - protein, 1218 aa, synthetic construct
  REGION 1..1218: note = Cas12c2 polypeptide sequence
MTKHSIPLHAFRNSGADARKWKGRIALLAKRGKETMRTLQFPLEMSEPEAAAINTTPFAVAYNAIEGTGKGTLFDYWAKLHLAGFRFFPSGGAATIFRQQAVFEDASWNAAFCQQSGKDWPWLVPSKLYERFTKAPREVAKKDGSKKSIEFTQENVANESHVSLVGASITDKTPEDQKEFFLKMAGALAEKFDSWKSANEDRIVAMKVIDEFLKSEGLHLPSLENIAVKCSVETKPDNATVAWHDAPMSGVQNLAIGVFATCASRIDNIYDLNGGKLSKLIQESATTPNVTALSWLFGKGLEYFRTTDIDTIMQDFNIPASAKESIKPLVESAQAIPTMTVLGKKNYAPFRPNFGGKIDSWIANYASRLMLLNDILEQIEPGFELPQALLDNETLMSGIDMTGDELKELIEAVYAWVDAAKQGLATLLGRGGNVDDAVQTFEQFSAMMDTLNGTLNTISARYVRAVEMAGKDEARLEKLIECKFDIPKWCKSVPKLVGISGGLPKVEEEIKVMNAAFKDVRARMFVRFEEIAAYVASKGAGMDVYDALEKRELEQIKKLKSAVPERAHIQAYRAVLHRIGRAVQNCSEKTKQLFSSKVIEMGVFKNPSHLNNFIFNQKGAIYRSPFDRSRHAPYQLHADKLLKNDWLELLAEISATLMASESTEQMEDALRLERTRLQLQLSGLPDWEYPASLAKPDIEVEIQTALKMQLAKDTVTSDVLQRAFNLYSSVLSGLTFKLLRRSFSLKMRFSVADTTQLIYVPKVCDWAIPKQYLQAEGEIGIAARVVTESSPAKMVTEVEMKEPKALGHFMQQAPHDWYFDASLGGTQVAGRIVEKGKEVGKERKLVGYRMRGNSAYKTVLDKSLVGNTELSQCSMIIEIPYTQTVDADFRAQVQAGLPKVSINLPVKETITASNKDEQMLFDRFVAIDLGERGLGYAVFDAKTLELQESGHRPIKAITNLLNRTHHYEQRPNQRQKFQAKFNVNLSELRENTVGDVCHQINRICAYYNAFPVLEYMVPDRLDKQLKSVYESVTNRYIWSSTDAHKSARVQFWLGGETWEHPYLKSAKDKKPLVLSPGRGASGKGTSQTCSCCGRNPFDLIKDMKPRAKIAVVDGKAKLENSELKLFERNLESKDDMLARRHRNERAGMEQPLTPGNYTVDEIKALLRANLRRAPKNRRTKDTTVSEYHCVFSDCGKTMHADENAAVNIGGKFIADIEK

SEQ ID NO: 241 - protein, 1252 aa, Oleiphilus sp.
  REGION 1..1252: note = MISC_FEATURE - OspCas12c polypeptide sequence
MTKLRHRQKKLTHDWAGSKKREVLGSNGKLQNPLLMPVKKGQVTEFRKAFSAYARATKGEMTDGRKNMFTHSFEPFKTKPSLHQCELADKAYQSLHSYLPGSLAHFLLSAHALGFRIFSKSGEATAFQASSKIEAYESKLASELACVDLSIQNLTISTLFNALTTSVRGKGEETSADPLIARFYTLLTGKPLSRDTQGPERDLAEVISRKIASSFGTWKEMTANPLQSLQFFEEELHALDANVSLSPAFDVLIKMNDLQGDLKNRTIVFDPDAPVFEYNAEDPADIIIKLTARYAKEAVIKNQNVGNYVKNAITTTNANGLGWLLNKGLSLLPVSTDDELLEFIGVERSHPSCHALIELIAQLEAPELFEKNVFSDTRSEVQGMIDSAVSNHIARLSSSRNSLSMDSEELERLIKSFQIHTPHCSLFIGAQSLSQQLESLPEALQSGVNSADILLGSTQYMLTNSLVEESIATYQRTLNRINYLSGVAGQINGAIKRKAIDGEKIHLPAAWSELISLPFIGQPVIDVESDLAHLKNQYQTLSNEFDTLISALQKNFDLNFNKALLNRTQHFEAMCRSTKKNALSKPEIVSYRDLLARLTSCLYRGSLVLRRAGIEVLKKHKIFESNSELREHVHERKHFVFVSPLDRKAKKLLRLTDSRPDLLHVIDEILQHDNLENKDRESLWLVRSGYLLAGLPDQLSSSFINLPIITQKGDRRLIDLIQYDQINRDAFVMLVTSAFKSNLSGLQYRANKQSFVVTRTLSPYLGSKLVYVPKDKDWLVPSQMFEGRFADILQSDYMVWKDAGRLCVIDTAKHLSNIKKSVFSSEEVLAFLRELPHRTFIQTEVRGLGVNVDGIAFNNGDIPSLKTFSNCVQVKVSRTNTSLVQTLNRWFEGGKVSPPSIQFERAYYKKDDQIHEDAAKRKIRFQMPATELVHASDDAGWTPSYLLGIDPGEYGMGLSLVSINNGEVLDSGFIHINSLINFASKKSNHQTKVVPRQQYKSPYANYLEQSKDSAAGDIAHILDRLIYKLNALPVFEALSGNSQSAADQVWTKVLSFYTWGDNDAQNSIRKQHWFGASHWDIKGMLRQPPTEKKPKPYIAFPGSQVSSYGNSQRCSCCGRNPIEQLREMAKDTSIKELKIRNSEIQLFDGTIKLFNPDPSTVIERRRHNLGPSRIPVADRTFKNISPSSLEFKELITIVSRSIRHSPEFIAKKRGIGSEYFCAYSDCNSSLNSEANAAANVAQKFQKQLFFEL

SEQ ID NO: 242 - protein, 767 aa, synthetic construct
  REGION 1..767: note = Cas12g1 polypeptide sequence
MAQASSTPAVSPRPRPRYREERTLVRKLLPRPGQSKQEFRENVKKLRKAFLQFNADVSGVCQWAIQFRPRYGKPAEPTETFWKFFLEPETSLPPNDSRSPEFRRLQAFEAAAGINGAAALDDPAFTNELRDSILAVASRPKTKEAQRLFSRLKDYQPAHRMILAKVAAEWIESRYRRAHQNWERNYEEWKKEKQEWEQNHPELTPEIREAFNQIFQQLEVKEKRVRICPAARLLQNKDNCQYAGKNKHSVLCNQFNEFKKNHLQGKAIKFFYKDAEKYLRCGLQSLKPNVQGPFREDWNKYLRYMNLKEETLRGKNGGRLPHCKNLGQECEFNPHTALCKQYQQQLSSRPDLVQHDELYRKWRREYWREPRKPVFRYPSVKRHSIAKIFGENYFQADFKNSVVGLRLDSMPAGQYLEFAFAPWPRNYRPQPGETEISSVHLHFVGTRPRIGFRFRVPHKRSRFDCTQEELDELRSRTFPRKAQDQKFLEAARKRLLETFPGNAEQELRLLAVDLGTDSARAAFFIGKTFQQAFPLKIVKIEKLYEQWPNQKQAGDRRDASSKQPRPGLSRDHVGRHLQKMRAQASEIAQKRQELTGTPAPETTTDQAAKKATLQPFDLRGLTVHTARMIRDWARLNARQIIQLAEENQVDLIVLESLRGFRPPGYENLDQEKKRRVAFFAHGRIRRKVTEKAVERGMRVVTVPYLASSKVCAECRKKQKDNKQWEKNKKRGLFKCEGCGSQAQVDENAARVLGRVFWGEIELPTAIP

SEQ ID NO: 243 - protein, 870 aa, synthetic construct
  REGION 1..870: note = Cas12h1 polypeptide sequence
MKVHEIPRSQLLKIKQYEGSFVEWYRDLQEDRKKFASLLFRWAAFGYAAREDDGATYISPSQALLERRLLLGDAEDVAIKFLDVLFKGGAPSSSCYSLFYEDFALRDKAKYSGAKREFIEGLATMPLDKIIERIRQDEQLSKIPAEEWLILGAEYSPEEIWEQVAPRIVNVDRSLGKQLRERLGIKCRRPHDAGYCKILMEVVARQLRSHNETYHEYLNQTHEMKTKVANNLTNEFDLVCEFAEVLEEKNYGLGWYVLWQGVKQALKEQKKPTKIQIAVDQLRQPKFAGLLTAKWRALKGAYDTWKLKKRLEKRKAFPYMPNWDNDYQIPVGLTGLGVFTLEVKRTEVVVDLKEHGKLFCSHSHYFGDLTAEKHPSRYHLKFRHKLKLRKRDSRVEPTIGPWIEAALREITIQKKPNGVFYLGLPYALSHGIDNFQIAKRFFSAAKPDKEVINGLPSEMVVGAADLNLSNIVAPVKARIGKGLEGPLHALDYGYGELIDGPKILTPDGPRCGELISLKRDIVEIKSAIKEFKACQREGLTMSEETTTWLSEVESPSDSPRCMIQSRIADTSRRLNSFKYQMNKEGYQDLAEALRLLDAMDSYNSLLESYQRMHLSPGEQSPKEAKFDTKRASFRDLLRRRVAHTIVEYFDDCDIVFFEDLDGPSDSDSRNNALVKLLSPRTLLLYIRQALEKRGIGMVEVAKDGTSQNNPISGHVGWRNKQNKSEIYFYEDKELLVMDADEVGAMNILCRGLNHSVCPYSFVTKAPEKKNDEKKEGDYGKRVKRFLKDRYGSSNVRFLVASMGFVTVTTKRPKDALVGKRLYYHGGELVTHDLHNRMKDEIKYLVEKEVLARRVSLSDSTIKSYKSFAHV

SEQ ID NO: 244 - protein, 1093 aa, synthetic construct
  REGION 1..1093: note = Cas12i1 polypeptide sequence
MSNKEKNASETRKAYTTKMIPRSHDRMKLLGNFMDYLMDGTPIFFELWNQFGGGIDRDIISGTANKDKISDDLLLAVNWFKVMPINSKPQGVSPSNLANLFQQYSGSEPDIQAQEYFASNFDTEKHQWKDMRVEYERLLAELQLSRSDMHHDLKLMYKEKCIGLSLSTAHYITSVMFGTGAKNNRQTKHQFYSKVIQLLEESTQINSVEQLASIILKAGDCDSYRKLRIRCSRKGATPSILKIVQDYELGTNHDDEVNVPSLIANLKEKLGRFEYECEWKCMEKIKAFLASKVGPYYLGSYSAMLENALSPIKGMTTKNCKFVLKQIDAKNDIKYENEPFGKIVEGFFDSPYFESDTNVKWVLHPHHIGESNIKTLWEDLNAIHSKYEEDIASLSEDKKEKRIKVYQGDVCQTINTYCEEVGKEAKTPLVQLLRYLYSRKDDIAVDKIIDGITFLSKKHKVEKQKINPVIQKYPSFNFGNNSKLLGKIISPKDKLKHNLKCNRNQVDNYIWIEIKVLNTKTMRWEKHHYALSSTRFLEEVYYPATSENPPDALAARFRTKTNGYEGKPALSAEQIEQIRSAPVGLRKVKKRQMRLEAARQQNLLPRYTWGKDFNINICKRGNNFEVTLATKVKKKKEKNYKVVLGYDANIVRKNTYAAIEAHANGDGVIDYNDLPVKPIESGFVTVESQVRDKSYDQLSYNGVKLLYCKPHVESRRSFLEKYRNGTMKDNRGNNIQIDFMKDFEAIADDETSLYYFNMKYCKLLQSSIRNHSSQAKEYREEIFELLRDGKLSVLKLSSLSNLSFVMFKVAKSLIGTYFGHLLKKPKNSKSDVKAPPITDEDKQKADPEMFALRLALEEKRLNKVKSKKEVIANKIVAKALELRDKYGPVLIKGENISDTTKKGKKSSTNSFLMDWLARGVANKVKEMVMMHQGLEFVEVNPNFTSHQDPFVHKNPENTFRARYSRCTPSELTEKNRKEILSFLSDKPSKRPTNAYYNEGAMAFLATYGLKKNDVLGVSLEKFKQIMANILHQRSEDQLLFPSRGGMFYLATYKLDADATSVNWNGKQFWVCNADLVAAYNVGLVDIQKDFKKK

SEQ ID NO: 245 - protein, 1054 aa, synthetic construct
  REGION 1..1054: note = Cas12i2 polypeptide sequence
MSSAIKSYKSVLRPNERKNQLLKSTIQCLEDGSAFFFKMLQGLFGGITPEIVRFSTEQEKQQQDIALWCAVNWFRPVSQDSLTHTIASDNLVEKFEEYYGGTASDAIKQYFSASIGESYYWNDCRQQYYDLCRELGVEVSDLTHDLEILCREKCLAVATESNQNNSIISVLFGTGEKEDRSVKLRITKKILEAISNLKEIPKNVAPIQEIILNVAKATKETFRQVYAGNLGAPSTLEKFIAKDGQKEFDLKKLQTDLKKVIRGKSKERDWCCQEELRSYVEQNTIQYDLWAWGEMFNKAHTALKIKSTRNYNFAKQRLEQFKEIQSLNNLLVVKKLNDFFDSEFFSGEETYTICVHHLGGKDLSKLYKAWEDDPADPENAIVVLCDDLKNNFKKEPIRNILRYIFTIRQECSAQDILAAAKYNQQLDRYKSQKANPSVLGNQGFTWTNAVILPEKAQRNDRPNSLDLRIWLYLKLRHPDGRWKKHHIPFYDTRFFQEIYAAGNSPVDTCQFRTPRFGYHLPKLTDQTAIRVNKKHVKAAKTEARIRLAIQQGTLPVSNLKITEISATINSKGQVRIPVKFDVGRQKGTLQIGDRFCGYDQNQTASHAYSLWEVVKEGQYHKELGCFVRFISSGDIVSITENRGNQFDQLSYEGLAYPQYADWRKKASKFVSLWQITKKNKKKEIVTVEAKEKFDAICKYQPRLYKFNKEYAYLLRDIVRGKSLVELQQIRQEIFRFIEQDCGVTRLGSLSLSTLETVKAVKGIIYSYFSTALNASKNNPISDEQRKEFDPELFALLEKLELIRTRKKKQKVERIANSLIQTCLENNIKFIRGEGDLSTTNNATKKKANSRSMDWLARGVFNKIRQLAPMHNITLFGCGSLYTSHQDPLVHRNPDKAMKCRWAAIPVKDIGDWVLRKLSQNLRAKNIGTGEYYHQGVKEFLSHYELQDLEEELLKWRSDRKSNIPCWVLQNRLAEKLGNKEAVVYIPVRGGRIYFATHKVATGAVSIVFDQKQVWVCNADHVAAANIALTVKGIGEQSSDEENPDGSRIKLQLTS

SEQ ID NO: 246 - protein, 4 aa, synthetic construct
  REGION 1..4: note = synthetic peptide sequence
GGGS

SEQ ID NO: 247 - protein, 5 aa, synthetic construct
  REGION 1..5: note = synthetic peptide sequence
GGGGS

SEQ ID NO: 248 - protein, 5 aa, synthetic construct
  REGION 1..5: note = synthetic peptide sequence
EAAAK

SEQ ID NO: 249 - protein, 16 aa, synthetic construct
  REGION 1..16: note = synthetic peptide sequence
SGSETPGTSESATPES

SEQ ID NO: 250 - protein, 6 aa, synthetic construct
  REGION 1..6: note = linker peptide sequence
GGSGGS

SEQ ID NO: 251 - protein, 20 aa, synthetic construct
  REGION 1..20: note = synthetic peptide sequence
GSSGSETPGTSESATPESSG

SEQ ID NO: 252 - DNA, 18 bp, synthetic construct
  misc_feature 1..18: note = synthetic oligonucleotide sequence
  source 1..18: mol_type = other DNA
ggaggctctggaggaagc

SEQ ID NO: 253 - DNA, 60 bp, synthetic construct
  misc_feature 1..60: note = synthetic oligonucleotide sequence
  source 1..60: mol_type = other DNA
ggctcttctggatctgaaacacctggcacaagcgagagcgccacccctgagagctctggc

SEQ ID NO: 254 - protein, 1129 aa, Alicyclobacillus acidiphilus
  REGION 1..1129: note = MISC_FEATURE - AacCas12b polypeptide sequence
MAVKSMKVKLRLDNMPEIRAGLWKLHTEVNAGVRYYTEWLSLLRQENLYRRSPNGDGEQECYKTAEECKAELLERLRARQVENGHCGPAGSDDELLQLARQLYELLVPQAIGAKGDAQQIARKFLSPLADKDAVGGLGIAKAGNKPRWVRMREAGEPGWEEEKAKAEARKSTDRTADVLRALADFGLKPLMRVYTDSDMSSVQWKPLRKGQAVRTWDRDMFQQAIERMMSWESWNQRVGEAYAKLVEQKSRFEQKNFVGQEHLVQLVNQLQQDMKEASHGLESKEQTAHYLTGRALRGSDKVFEKWEKLDPDAPFDLYDTEIKNVQRRNTRRFGSHDLFAKLAEPKYQALWREDASFLTRYAVYNSIVRKLNHAKMFATFTLPDATAHPIWTRFDKLGGNLHQYTFLFNEFGEGRHAIRFQKLLTVEDGVAKEVDDVTVPISMSAQLDDLLPRDPHELVALYFQDYGAEQHLAGEFGGAKIQYRRDQLNHLHARRGARDVYLNLSVRVQSQSEARGERRPPYAAVFRLVGDNHRAFVHFDKLSDYLAEHPDDGKLGSEGLLSGLRVMSVDLGLRTSASISVFRVARKDELKPNSEGRVPFCFPIEGNENLVAVHERSQLLKLPGETESKDLRAIREERQRTLRQLRTQLAYLRLLVRCGSEDVGRRERSWAKLIEQPMDANQMTPDWREAFEDELQKLKSLYGICGDREWTEAVYESVRRVWRHMGKQVRDWRKDVRSGERPKIRGYQKDVVGGNSIEQIEYLERQYKFLKSWSFFGKVSGQVIRAEKGSRFAITLREHIDHAKEDRLKKLADRIIMEALGYVYALDDERGKGKWVAKYPPCQLILLEELSEYQFNNDRPPSENNQLMQWSHRGVFQELLNQAQVHDLLVGTMYAAFSSRFDARTGAPGIRCRRVPARCAREQNPEPFPWWLNKFVAEHKLDGCPLRADDLIPTGEGEFFVSPFSAEEGDFHQIHADLNAAQNLQRRLWSDFDISQIRLRCDWGEVDGEPVLIPRTTGKRTADSYGNKVFYTKTGVTYYERERGKKRRKVFAQEELSEEEAELLVEADEAREKSVVLMRDPSGIINRGDWTRQKEFWSMVNQRIEGYLVKQIRSRVRLQESACENTGDI

SEQ ID NO: 255 - protein, 1140 aa, Bacillus hisashii
  REGION 1..1140: note = MISC_FEATURE - BhCas12b polypeptide sequence
MAPKKKRKVGIHGVPAAATRSFILKIEPNEEVKKGLWKTHEVLNHGIAYYMNILKLIRQEAIYEHHEQDPKNPKKVSKAEIQAELWDFVLKMQKCNSFTHEVDKDEVFNILRELYEELVPSSVEKKGEANQLSNKFLYPLVDPNSQSGKGTASSGRKPRWYNLKIAGDPSWEEEKKKWEEDKKKDPLAKILGKLAEYGLIPLFIPYTDSNEPIVKEIKWMEKSRNQSVRRLDKDMFIQALERFLSWESWNLKVKEEYEKVEKEYKTLEERIKEDIQALKALEQYEKERQEQLLRDTLNTNEYRLSKRGLRGWREIIQKWLKMDENEPSEKYLEVFKDYQRKHPREAGDYSVYEFLSKKENHFIWRNHPEYPYLYATFCEIDKKKKDAKQQATFTLADPINHPLWVRFEERSGSNLNKYRILTEQLHTEKLKKKLTVQLDRLIYPTESGGWEEKGKVDIVLLPSRQFYNQIFLDIEEKGKHAFTYKDESIKFPLKGTLGGARVQFDRDHLRRYPHKVESGNVGRIYFNMTVNIEPTESPVSKSLKIHRDDFPKVVNFKPKELTEWIKDSKGKKLKSGIESLEIGLRVMSIDLGQRQAAAASIFEVVDQKPDIEGKLFFPIKGTELYAVHRASFNIKLPGETLVKSREVLRKAREDNLKLMNQKLNFLRNVLHFQQFEDITEREKRVTKWISRQENSDVPLVYQDELIQIRELMYKPYKDWVAFLKQLHKRLEVEIGKEVKHWRKSLSDGRKGLYGISLKNIDEIDRTRKFLLRWSLRPTEPGEVRRLEPGQRFAIDQLNHLNALKEDRLKKMANTIIMHALGYCYDVRKKKWQAKNPACQIILFEDLSNYNPYEERSRFENSKLMKWSRREIPRQVALQGEIYGLQVGEVGAQFSSRFHAKTGSPGIRCSVVTKEKLQDNRFFKNLQREGRLTLDKIAVLKEGDLYPDKGGEKFISLSKDRKCVTTHADINAAQNLQKRFWTRTHGFYKVYCKAYQVDGQTVYIPESKDQKQKIIEEFGEGYFILKDGVYEWVNAGKLKIKKGSSKQSSSELVDSDILKDSFDLASELKGEKLMLYRDPSGNVFPSDKWMAAGVFFGKLERILISKLTNQYSISTIEDDSSKQSMKRPAATKKAGQAKKKK

SEQ ID NO: 256 - protein, 1108 aa, Bacillus thermoamylovorans
  REGION 1..1108: note = MISC_FEATURE - BTCas12b polypeptide sequence
MATRSFILKIEPNEEVKKGLWKTHEVLNHGIAYYMNILKLIRQEAIYEHHEQDPKNPKKVSKAEIQAELWDFVLKMQKCNSFTHEVDKDVVFNILRELYEELVPSSVEKKGEANQLSNKFLYPLVDPNSQSGKGTASSGRKPRWYNLKIAGDPSWEEEKKKWEEDKKKDPLAKILGKLAEYGLIPLFIPFTDSNEPIVKEIKWMEKSRNQSVRRLDKDMFIQALERFLSWESWNLKVKEEYEKVEKEHKTLEERIKEDIQAFKSLEQYEKERQEQLLRDTLNTNEYRLSKRGLRGWREIIQKWLKMDENEPSEKYLEVFKDYQRKHPREAGDYSVYEFLSKKENHFIWRNHPEYPYLYATFCEIDKKKKDAKQQATFTLADPINHPLWVRFEERSGSNLNKYRILTEQLHTEKLKKKLTVQLDRLIYPTESGGWEEKGKVDIVLLPSRQFYNQIFLDIEEKGKHAFTYKDESIKFPLKGTLGGARVQFDRDHLRRYPHKVESGNVGRIYFNMTVNIEPTESPVSKSLKIHRDDFPKFVNFKPKELTEWIKDSKGKKLKSGIESLEIGLRVMSIDLGQRQAAAASIFEVVDQKPDIEGKLFFPIKGTELYAVHRASFNIKLPGETLVKSREVLRKAREDNLKLMNQKLNFLRNVLHFQQFEDITEREKRVTKWISRQENSDVPLVYQDELIQIRELMYKPYKDWVAFLKQLHKRLEVEIGKEVKHWRKSLSDGRKGLYGISLKNIDEIDRTRKFLLRWSLRPTEPGEVRRLEPGQRFAIDQLNHLNALKEDRLKKMANTIIMHALGYCYDVRKKKWQAKNPACQIILFEDLSNYNPYEERSRFENSKLMKWSRREIPRQVALQGEIYGLQVGEVGAQFSSRFHAKTGSPGIRCSVVTKEKLQDNRFFKNLQREGRLTLDKIAVLKEGDLYPDKGGEKFISLSKDRKLVTTHADINAAQNLQKRFWTRTHGFYKVYCKAYQVDGQTVYIPESKDQKQKIIEEFGEGYFILKDGVYEWGNAGKLKIKKGSSKQSSSELVDSDILKDSFDLASELKGEKLMLYRDPSGNVFPSDKWMAAGVFFGKLERILISKLTNQYSISTIEDDSSKQSM

SEQ ID NO: 257 - protein, 1112 aa, Bacillus sp.
  REGION 1..1112: note = MISC_FEATURE - BvCas12b (Bacillus sp. V3-13) polypeptide sequence
MAIRSIKLKMKTNSGTDSIYLRKALWRTHQLINEGIAYYMNLLTLYRQEAIGDKTKEAYQAELINIIRNQQRNNGSSEEHGSDQEILALLRQLYELIIPSSIGESGDANQLGNKFLYPLVDPNSQSGKGTSNAGRKPRWKRLKEEGNPDWELEKKKDEERKAKDPTVKIFDNLNKYGLLPLFPLFTNIQKDIEWLPLGKRQSVRKWDKDMFIQAIERLLSWESWNRRVADEYKQLKEKTESYYKEHLTGGEEWIEKIRKFEKERNMELEKNAFAPNDGYFITSRQIRGWDRVYEKWSKLPESASPEELWKVVAEQQNKMSEGFGDPKVFSFLANRENRDIWRGHSERIYHIAAYNGLQKKLSRTKEQATFTLPDAIEHPLWIRYESPGGTNLNLFKLEEKQKKNYYVTLSKIIWPSEEKWIEKENIEIPLAPSIQFNRQIKLKQHVKGKQEISFSDYSSRISLDGVLGGSRIQFNRKYIKNHKELLGEGDIGPVFFNLVVDVAPLQETRNGRLQSPIGKALKVISSDFSKVIDYKPKELMDWMNTGSASNSFGVASLLEGMRVMSIDMGQRTSASVSIFEVVKELPKDQEQKLFYSINDTELFAIHKRSFLLNLPGEVVTKNNKQQRQERRKKRQFVRSQIRMLANVLRLETKKTPDERKKAIHKLMEIVQSYDSWTASQKEVWEKELNLLTNMAAFNDEIWKESLVELHHRIEPYVGQIVSKWRKGLSEGRKNLAGISMWNIDELEDTRRLLISWSKRSRTPGEANRIETDEPFGSSLLQHIQNVKDDRLKQMANLIIMTALGFKYDKEEKDRYKRWKETYPACQIILFENLNRYLFNLDRSRRENSRLMKWAHRSIPRTVSMQGEMFGLQVGDVRSEYSSRFHAKTGAPGIRCHALTEEDLKAGSNTLKRLIEDGFINESELAYLKKGDIIPSQGGELFVTLSKRYKKDSDNNELTVIHADINAAQNLQKRFWQQNSEVYRVPCQLARMGEDKLYIPKSQTETIKKYFGKGSFVKNNTEQEVYKWEKSEKMKIKTDTTFDLQDLDGFEDISKTIELAQEQQKKYLTMFRDPSGYFFNNETWRPQKEYWSIVNNIIKSCLKKKILSNKVEL

SEQ ID NO: 258 - DNA, 47 bp, synthetic construct
  misc_feature 1..47: note = 5'UTR oligonucleotide sequence
  source 1..47: mol_type = other DNA
gggaaataagagagaaaagaagagtaagaagaaatataagagccacc

SEQ ID NO: 259 - DNA, 101 bp, synthetic construct
  misc_feature 1..101: note = 3'UTR (TriLink standard UTR)polynucleotide sequence
  source 1..101: mol_type = other DNA
gctggagcctcggtggccatgcttcttgccccttgggcctccccccagcccctcctccccttcctgcacccgtacccccgtggtctttgaataaagtctga

SEQ ID NO: 260 - DNA, 3420 bp, Bacillus hisashii
  misc_feature 1..3420: note = bhCas12b (V4) polynucleotide sequence
  source 1..3420: mol_type = genomic DNA
atggccccaaagaagaagcggaaggtcggtatccacggagtcccagcagccgccaccagatccttcatcctgaagatcgagcccaacgaggaagtgaagaaaggcctctggaaaacccacgaggtgctgaaccacggaatcgcctactacatgaatatcctgaagctgatccggcaagaggccatctacgagcaccacgagcaggaccccaagaatcccaagaaggtgtccaaggccgagatccaggccgagctgtgggatttcgtgctgaagatgcagaagtgcaacagcttcacacacgaggtggacaaggacgaggtgttcaacatcctgagagagctgtacgaggaactggtgcccagcagcgtggaaaagaagggcgaagccaaccagctgagcaacaagtttctgtaccctctggtggaccccaacagccagtctggaaagggaacagccagcagcggcagaaagcccagatggtacaacctgaagattgccggcgatccctcctgggaagaagagaagaagaagtgggaagaagataagaaaaaggacccgctggccaagatcctgggcaagctggctgagtacggactgatccctctgttcatcccctacaccgacagcaacgagcccatcgtgaaagaaatcaagtggatggaaaagtcccggaaccagagcgtgcggcggctggataaggacatgttcattcaggccctggaacggttcctgagctgggagagctggaacctgaaagtgaaagaggaatacgagaaggtcgagaaagagtacaagaccctggaagagaggatcaaagaggacatccaggctctgaaggctctggaacagtatgagaaagagcggcaagaacagctgctgcgggacaccctgaacaccaacgagtaccggctgagcaagagaggccttagaggctggcgggaaatcatccagaaatggctgaaaatggacgagaacgagccctccgagaagtacctggaagtgttcaaggactaccagcggaagcaccctagagaggccggcgattacagcgtgtacgagttcctgtccaagaaagagaaccacttcatctggcggaatcaccctgagtacccctacctgtacgccaccttctgcgagatcgacaagaaaaagaaggacgccaagcagcaggccaccttcacactggccgatcctatcaatcaccctctgtgggtccgattcgaggaaagaagcggcagcaacctgaacaagtacagaatcctgaccgagcagctgcacaccgagaagctgaagaaaaagctgacagtgcagctggaccggctgatctaccctacagaatctggcggctgggaagagaagggcaaagtggacattgtgctgctgcccagccggcagttctacaaccagatcttcctggacatcgaggaaaagggcaagcacgccttcacctacaaggatgagagcatcaagttccctctgaagggcacactcggcggagccagagtgcagttcgacagagatcacctgagaagataccctcacaaggtggaaagcggcaacgtgggcagaatctacttcaacatgaccgtgaacatcgagcctacagagtccccagtgtccaagtctctgaagatccaccgggacgacttccccaaggtggtcaacttcaagcccaaagaactgaccgagtggatcaaggacagcaagggcaagaaactgaagtccggcatcgagtccctggaaatcggcctgagagtgatgagcatcgacctgggacagagacaggccgctgccgcctctattttcgaggtggtggatcagaagcccgacatcgaaggcaagctgtttttcccaatcaagggcaccgagctgtatgccgtgcacagagccagcttcaacatcaagctgcccggcgagacactggtcaagagcagagaagtgctgcggaaggccagagaggacaatctgaaactgatgaaccagaagctcaacttcctgcggaacgtgctgcacttccagcagttcgaggacatcaccgagagagagaagcgggtcaccaagtggatcagcagacaagagaacagcgacgtgcccctggtgtaccaggatgagctgatccagatccgcgagctgatgtacaagccttacaaggactgggtcgccttcctgaagcagctccacaagagactggaagtcgagatcggcaaagaagtgaagcactggcggaagtccctgagcgacggaagaaagggcctgtacggcatctccctgaagaacatcgacgagatcgatcggacccggaagttcctgctgagatggtccctgaggcctaccgaacctggcgaagtgcgtagactggaacccggccagagattcgccatcgaccagctgaatcacctgaacgccctgaaagaagatcggctgaagaagatggccaacaccatcatcatgcacgccctgggctactgctacgacgtgcggaagaagaaatggcaggctaagaaccccgcctgccagatcatcctgttcgaggatctgagcaactacaacccctacgaggaaaggtcccgcttcgagaacagcaagctcatgaagtggtccagacgcgagatccccagacaggttgcactgcagggcgagatctatggcctgcaagtgggagaagtgggcgctcagttcagcagcagattccacgccaagacaggcagccctggcatcagatgtagcgtcgtgaccaaagagaagctgcaggacaatcggttcttcaagaatctgcagagagagggcagactgaccctggacaaaatcgccgtgctgaaagagggcgatctgtacccagacaaaggcggcgagaagttcatcagcctgagcaaggatcggaagtgcgtgaccacacacgccgacatcaacgccgctcagaacctgcagaagcggttctggacaagaacccacggcttctacaaggtgtactgcaaggcctaccaggtggacggccagaccgtgtacatccctgagagcaaggaccagaagcagaagatcatcgaagagttcggcgagggctacttcattctgaaggacggggtgtacgaatgggtcaacgccggcaagctgaaaatcaagaagggcagctccaagcagagcagcagcgagctggtggatagcgacatcctgaaagacagcttcgacctggcctccgagctgaaaggcgaaaagctgatgctgtacagggaccccagcggcaatgtgttccccagcgacaaatggatggccgctggcgtgttcttcggaaagctggaacgcatcctgatcagcaagctgaccaaccagtactccatcagcaccatcgaggacgacagcagcaagcagtctatgaaaaggccggcggccacgaaaaaggccggccaggcaaaaaagaaaaag

SEQ ID NO: 261 - protein, 17 aa, synthetic construct
  REGION 1..17: note = synthetic peptide sequence
MAPKKKRKVGIHGVPAA

SEQ ID NO: 262 - DNA, 51 bp, synthetic construct
  misc_feature 1..51: note = synthetic oligonucleotide sequence
  source 1..51: mol_type = other DNA
atggccccaaagaagaagcggaaggtcggtatccacggagtcccagcagcc

SEQ ID NO: 263 - protein, 1554 aa, synthetic construct
  REGION 1..1554: note = 101 Cas9 TadAins 1015 polypeptide sequence
MDKKYSIGLAIGTNSVGWAVITDEYKVPSKKFKVLGNTDRHSIKKNLIGALLFDSGETAEATRLKRTARRRYTRRKNRICYLQEIFSNEMAKVDDSFFHRLEESFLVEEDKKHERHPIFGNIVDEVAYHEKYPTIYHLRKKLVDSTDKADLRLIYLALAHMIKFRGHFLIEGDLNPDNSDVDKLFIQLVQTYNQLFEENPINASGVDAKAILSARLSKSRRLENLIAQLPGEKKNGLFGNLIALSLGLTPNFKSNFDLAEDAKLQLSKDTYDDDLDNLLAQIGDQYADLFLAAKNLSDAILLSDILRVNTEITKAPLSASMIKRYDEHHQDLTLLKALVRQQLPEKYKEIFFDQSKNGYAGYIDGGASQEEFYKFIKPILEKMDGTEELLVKLNREDLLRKQRTFDNGSIPHQIHLGELHAILRRQEDFYPFLKDNREKIEKILTFRIPYYVGPLARGNSRFAWMTRKSEETITPWNFEEVVDKGASAQSFIERMTNFDKNLPNEKVLPKHSLLYEYFTVYNELTKVKYVTEGMRKPAFLSGEQKKAIVDLLFKTNRKVTVKQLKEDYFKKIECFDSVEISGVEDRFNASLGTYHDLLKIIKDKDFLDNEENEDILEDIVLTLTLFEDREMIEERLKTYAHLFDDKVMKQLKRRRYTGWGRLSRKLINGIRDKQSGKTILDFLKSDGFANRNFMQLIHDDSLTFKEDIQKAQVSGQGDSLHEHIANLAGSPAIKKGILQTVKVVDELVKVMGRHKPENIVIEMARENQTTQKGQKNSRERMKRIEEGIKELGSQILKEHPVENTQLQNEKLYLYYLQNGRDMYVDQELDINRLSDYDVDHIVPQSFLKDDSIDNKVLTRSDKNRGKSDNVPSEEVVKKMKNYWRQLLNAKLITQRKFDNLTKAERGGLSELDKAGFIKRQLVETRQITKHVAQILDSRMNTKYDENDKLIREVKVITLKSKLVSDFRKDFQFYKVREINNYHHAHDAYLNAVVGTALIKKYPKLESEFVYGDYKVGSSGSETPGTSESATPESSGSEVEFSHEYWMRHALTLAKRARDEREVPVGAVLVLNNRVIGEGWNRAIGLHDPTAHAEIMALRQGGLVMQNYRLIDATLYVTFEPCVMCAGAMIHSRIGRVVFGVRNAKTGAAGSLMDVLHYPGMNHRVEITEGILADECAALLCYFFRMPRQVFNAQKKAQSSTDYDVRKMIAKSEQEIGKATAKYFFYSNIMNFFKTEITLANGEIRKRPLIETNGETGEIVWDKGRDFATVRKVLSMPQVNIVKKTEVQTGGFSKESILPKRNSDKLIARKKDWDPKKYGGFDSPTVAYSVLVVAKVEKGKSKKLKSVKELLGITIMERSSFEKNPIDFLEAKGYKEVKKDLIIKLPKYSLFELENGRKRMLASAGELQKGNELALPSKYVNFLYLASHYEKLKGSPEDNEQKQLFVEQHKHYLDEIIEQISEFSKRVILADANLDKVLSAYNKHRDKPIREQAENIIHLFTLTNLGAPAAFKYFDTTIDRKRYTSTKEVLDATLIHQSITGLYETRIDLSQLGGD

SEQ ID NO: 264 - protein, 1554 aa, synthetic construct
  REGION 1..1554: note = 102 Cas9 TadAins 1022 polypeptide sequence
MDKKYSIGLAIGTNSVGWAVITDEYKVPSKKFKVLGNTDRHSIKKNLIGALLFDSGETAEATRLKRTARRRYTRRKNRICYLQEIFSNEMAKVDDSFFHRLEESFLVEEDKKHERHPIFGNIVDEVAYHEKYPTIYHLRKKLVDSTDKADLRLIYLALAHMIKFRGHFLIEGDLNPDNSDVDKLFIQLVQTYNQLFEENPINASGVDAKAILSARLSKSRRLENLIAQLPGEKKNGLFGNLIALSLGLTPNFKSNFDLAEDAKLQLSKDTYDDDLDNLLAQIGDQYADLFLAAKNLSDAILLSDILRVNTEITKAPLSASMIKRYDEHHQDLTLLKALVRQQLPEKYKEIFFDQSKNGYAGYIDGGASQEEFYKFIKPILEKMDGTEELLVKLNREDLLRKQRTFDNGSIPHQIHLGELHAILRRQEDFYPFLKDNREKIEKILTFRIPYYVGPLARGNSRFAWMTRKSEETITPWNFEEVVDKGASAQSFIERMTNFDKNLPNEKVLPKHSLLYEYFTVYNELTKVKYVTEGMRKPAFLSGEQKKAIVDLLFKTNRKVTVKQLKEDYFKKIECFDSVEISGVEDRFNASLGTYHDLLKIIKDKDFLDNEENEDILEDIVLTLTLFEDREMIEERLKTYAHLFDDKVMKQLKRRRYTGWGRLSRKLINGIRDKQSGKTILDFLKSDGFANRNFMQLIHDDSLTFKEDIQKAQVSGQGDSLHEHIANLAGSPAIKKGILQTVKVVDELVKVMGRHKPENIVIEMARENQTTQKGQKNSRERMKRIEEGIKELGSQILKEHPVENTQLQNEKLYLYYLQNGRDMYVDQELDINRLSDYDVDHIVPQSFLKDDSIDNKVLTRSDKNRGKSDNVPSEEVVKKMKNYWRQLLNAKLITQRKFDNLTKAERGGLSELDKAGFIKRQLVETRQITKHVAQILDSRMNTKYDENDKLIREVKVITLKSKLVSDFRKDFQFYKVREINNYHHAHDAYLNAVVGTALIKKYPKLESEFVYGDYKVYDVRKMIGSSGSETPGTSESATPESSGSEVEFSHEYWMRHALTLAKRARDEREVPVGAVLVLNNRVIGEGWNRAIGLHDPTAHAEIMALRQGGLVMQNYRLIDATLYVTFEPCVMCAGAMIHSRIGRVVFGVRNAKTGAAGSLMDVLHYPGMNHRVEITEGILADECAALLCYFFRMPRQVFNAQKKAQSSTDAKSEQEIGKATAKYFFYSNIMNFFKTEITLANGEIRKRPLIETNGETGEIVWDKGRDFATVRKVLSMPQVNIVKKTEVQTGGFSKESILPKRNSDKLIARKKDWDPKKYGGFDSPTVAYSVLVVAKVEKGKSKKLKSVKELLGITIMERSSFEKNPIDFLEAKGYKEVKKDLIIKLPKYSLFELENGRKRMLASAGELQKGNELALPSKYVNFLYLASHYEKLKGSPEDNEQKQLFVEQHKHYLDEIIEQISEFSKRVILADANLDKVLSAYNKHRDKPIREQAENIIHLFTLTNLGAPAAFKYFDTTIDRKRYTSTKEVLDATLIHQSITGLYETRIDLSQLGGD

SEQ ID NO: 265 - protein, 1554 aa, synthetic construct
  REGION 1..1554: note = 103 Cas9 TadAins 1029 polypeptide sequence
MDKKYSIGLAIGTNSVGWAVITDEYKVPSKKFKVLGNTDRHSIKKNLIGALLFDSGETAEATRLKRTARRRYTRRKNRICYLQEIFSNEMAKVDDSFFHRLEESFLVEEDKKHERHPIFGNIVDEVAYHEKYPTIYHLRKKLVDSTDKADLRLIYLALAHMIKFRGHFLIEGDLNPDNSDVDKLFIQLVQTYNQLFEENPINASGVDAKAILSARLSKSRRLENLIAQLPGEKKNGLFGNLIALSLGLTPNFKSNFDLAEDAKLQLSKDTYDDDLDNLLAQIGDQYADLFLAAKNLSDAILLSDILRVNTEITKAPLSASMIKRYDEHHQDLTLLKALVRQQLPEKYKEIFFDQSKNGYAGYIDGGASQEEFYKFIKPILEKMDGTEELLVKLNREDLLRKQRTFDNGSIPHQIHLGELHAILRRQEDFYPFLKDNREKIEKILTFRIPYYVGPLARGNSRFAWMTRKSEETITPWNFEEVVDKGASAQSFIERMTNFDKNLPNEKVLPKHSLLYEYFTVYNELTKVKYVTEGMRKPAFLSGEQKKAIVDLLFKTNRKVTVKQLKEDYFKKIECFDSVEISGVEDRFNASLGTYHDLLKIIKDKDFLDNEENEDILEDIVLTLTLFEDREMIEERLKTYAHLFDDKVMKQLKRRRYTGWGRLSRKLINGIRDKQSGKTILDFLKSDGFANRNFMQLIHDDSLTFKEDIQKAQVSGQGDSLHEHIANLAGSPAIKKGILQTVKVVDELVKVMGRHKPENIVIEMARENQTTQKGQKNSRERMKRIEEGIKELGSQILKEHPVENTQLQNEKLYLYYLQNGRDMYVDQELDINRLSDYDVDHIVPQSFLKDDSIDNKVLTRSDKNRGKSDNVPSEEVVKKMKNYWRQLLNAKLITQRKFDNLTKAERGGLSELDKAGFIKRQLVETRQITKHVAQILDSRMNTKYDENDKLIREVKVITLKSKLVSDFRKDFQFYKVREINNYHHAHDAYLNAVVGTALIKKYPKLESEFVYGDYKVYDVRKMIAKSEQEIGSSGSETPGTSESATPESSGSEVEFSHEYWMRHALTLAKRARDEREVPVGAVLVLNNRVIGEGWNRAIGLHDPTAHAEIMALRQGGLVMQNYRLIDATLYVTFEPCVMCAGAMIHSRIGRVVFGVRNAKTGAAGSLMDVLHYPGMNHRVEITEGILADECAALLCYFFRMPRQVFNAQKKAQSSTDGKATAKYFFYSNIMNFFKTEITLANGEIRKRPLIETNGETGEIVWDKGRDFATVRKVLSMPQVNIVKKTEVQTGGFSKESILPKRNSDKLIARKKDWDPKKYGGFDSPTVAYSVLVVAKVEKGKSKKLKSVKELLGITIMERSSFEKNPIDFLEAKGYKEVKKDLIIKLPKYSLFELENGRKRMLASAGELQKGNELALPSKYVNFLYLASHYEKLKGSPEDNEQKQLFVEQHKHYLDEIIEQISEFSKRVILADANLDKVLSAYNKHRDKPIREQAENIIHLFTLTNLGAPAAFKYFDTTIDRKRYTSTKEVLDATLIHQSITGLYETRIDLSQLGGD

SEQ ID NO: 266 - protein, 1554 aa, synthetic construct
  REGION 1..1554: note = 103 Cas9 TadAins 1040 polypeptide sequence
MDKKYSIGLAIGTNSVGWAVITDEYKVPSKKFKVLGNTDRHSIKKNLIGALLFDSGETAEATRLKRTARRRYTRRKNRICYLQEIFSNEMAKVDDSFFHRLEESFLVEEDKKHERHPIFGNIVDEVAYHEKYPTIYHLRKKLVDSTDKADLRLIYLALAHMIKFRGHFLIEGDLNPDNSDVDKLFIQLVQTYNQLFEENPINASGVDAKAILSARLSKSRRLENLIAQLPGEKKNGLFGNLIALSLGLTPNFKSNFDLAEDAKLQLSKDTYDDDLDNLLAQIGDQYADLFLAAKNLSDAILLSDILRVNTEITKAPLSASMIKRYDEHHQDLTLLKALVRQQLPEKYKEIFFDQSKNGYAGYIDGGASQEEFYKFIKPILEKMDGTEELLVKLNREDLLRKQRTFDNGSIPHQIHLGELHAILRRQEDFYPFLKDNREKIEKILTFRIPYYVGPLARGNSRFAWMTRKSEETITPWNFEEVVDKGASAQSFIERMTNFDKNLPNEKVLPKHSLLYEYFTVYNELTKVKYVTEGMRKPAFLSGEQKKAIVDLLFKTNRKVTVKQLKEDYFKKIECFDSVEISGVEDRFNASLGTYHDLLKIIKDKDFLDNEENEDILEDIVLTLTLFEDREMIEERLKTYAHLFDDKVMKQLKRRRYTGWGRLSRKLINGIRDKQSGKTILDFLKSDGFANRNFMQLIHDDSLTFKEDIQKAQVSGQGDSLHEHIANLAGSPAIKKGILQTVKVVDELVKVMGRHKPENIVIEMARENQTTQKGQKNSRERMKRIEEGIKELGSQILKEHPVENTQLQNEKLYLYYLQNGRDMYVDQELDINRLSDYDVDHIVPQSFLKDDSIDNKVLTRSDKNRGKSDNVPSEEVVKKMKNYWRQLLNAKLITQRKFDNLTKAERGGLSELDKAGFIKRQLVETRQITKHVAQILDSRMNTKYDENDKLIREVKVITLKSKLVSDFRKDFQFYKVREINNYHHAHDAYLNAVVGTALIKKYPKLESEFVYGDYKVYDVRKMIAKSEQEIGKATAKYFFYSGSSGSETPGTSESATPESSGSEVEFSHEYWMRHALTLAKRARDEREVPVGAVLVLNNRVIGEGWNRAIGLHDPTAHAEIMALRQGGLVMQNYRLIDATLYVTFEPCVMCAGAMIHSRIGRVVFGVRNAKTGAAGSLMDVLHYPGMNHRVEITEGILADECAALLCYFFRMPRQVFNAQKKAQSSTDNIMNFFKTEITLANGEIRKRPLIETNGETGEIVWDKGRDFATVRKVLSMPQVNIVKKTEVQTGGFSKESILPKRNSDKLIARKKDWDPKKYGGFDSPTVAYSVLVVAKVEKGKSKKLKSVKELLGITIMERSSFEKNPIDFLEAKGYKEVKKDLIIKLPKYSLFELENGRKRMLASAGELQKGNELALPSKYVNFLYLASHYEKLKGSPEDNEQKQLFVEQHKHYLDEIIEQISEFSKRVILADANLDKVLSAYNKHRDKPIREQAENIIHLFTLTNLGAPAAFKYFDTTIDRKRYTSTKEVLDATLIHQSITGLYETRIDLSQLGGD

SEQ ID NO: 267 - protein, 1554 aa, synthetic construct
  REGION 1..1554: note = 105 Cas9 TadAins 1068 polypeptide sequence
MDKKYSIGLAIGTNSVGWAVITDEYKVPSKKFKVLGNTDRHSIKKNLIGALLFDSGETAEATRLKRTARRRYTRRKNRICYLQEIFSNEMAKVDDSFFHRLEESFLVEEDKKHERHPIFGNIVDEVAYHEKYPTIYHLRKKLVDSTDKADLRLIYLALAHMIKFRGHFLIEGDLNPDNSDVDKLFIQLVQTYNQLFEENPINASGVDAKAILSARLSKSRRLENLIAQLPGEKKNGLFGNLIALSLGLTPNFKSNFDLAEDAKLQLSKDTYDDDLDNLLAQIGDQYADLFLAAKNLSDAILLSDILRVNTEITKAPLSASMIKRYDEHHQDLTLLKALVRQQLPEKYKEIFFDQSKNGYAGYIDGGASQEEFYKFIKPILEKMDGTEELLVKLNREDLLRKQRTFDNGSIPHQIHLGELHAILRRQEDFYPFLKDNREKIEKILTFRIPYYVGPLARGNSRFAWMTRKSEETITPWNFEEVVDKGASAQSFIERMTNFDKNLPNEKVLPKHSLLYEYFTVYNELTKVKYVTEGMRKPAFLSGEQKKAIVDLLFKTNRKVTVKQLKEDYFKKIECFDSVEISGVEDRFNASLGTYHDLLKIIKDKDFLDNEENEDILEDIVLTLTLFEDREMIEERLKTYAHLFDDKVMKQLKRRRYTGWGRLSRKLINGIRDKQSGKTILDFLKSDGFANRNFMQLIHDDSLTFKEDIQKAQVSGQGDSLHEHIANLAGSPAIKKGILQTVKVVDELVKVMGRHKPENIVIEMARENQTTQKGQKNSRERMKRIEEGIKELGSQILKEHPVENTQLQNEKLYLYYLQNGRDMYVDQELDINRLSDYDVDHIVPQSFLKDDSIDNKVLTRSDKNRGKSDNVPSEEVVKKMKNYWRQLLNAKLITQRKFDNLTKAERGGLSELDKAGFIKRQLVETRQITKHVAQILDSRMNTKYDENDKLIREVKVITLKSKLVSDFRKDFQFYKVREINNYHHAHDAYLNAVVGTALIKKYPKLESEFVYGDYKVYDVRKMIAKSEQEIGKATAKYFFYSNIMNFFKTEITLANGEIRKRPLIETNGEGSSGSETPGTSESATPESSGSEVEFSHEYWMRHALTLAKRARDEREVPVGAVLVLNNRVIGEGWNRAIGLHDPTAHAEIMALRQGGLVMQNYRLIDATLYVTFEPCVMCAGAMIHSRIGRVVFGVRNAKTGAAGSLMDVLHYPGMNHRVEITEGILADECAALLCYFFRMPRQVFNAQKKAQSSTDTGEIVWDKGRDFATVRKVLSMPQVNIVKKTEVQTGGFSKESILPKRNSDKLIARKKDWDPKKYGGFDSPTVAYSVLVVAKVEKGKSKKLKSVKELLGITIMERSSFEKNPIDFLEAKGYKEVKKDLIIKLPKYSLFELENGRKRMLASAGELQKGNELALPSKYVNFLYLASHYEKLKGSPEDNEQKQLFVEQHKHYLDEIIEQISEFSKRVILADANLDKVLSAYNKHRDKPIREQAENIIHLFTLTNLGAPAAFKYFDTTIDRKRYTSTKEVLDATLIHQSITGLYETRIDLSQLGGD

SEQ ID NO: 268 - protein, 1554 aa, synthetic construct
  REGION 1..1554: note = 106 Cas9 TadAins 1247 polypeptide sequence
MDKKYSIGLAIGTNSVGWAVITDEYKVPSKKFKVLGNTDRHSIKKNLIGALLFDSGETAEATRLKRTARRRYTRRKNRICYLQEIFSNEMAKVDDSFFHRLEESFLVEEDKKHERHPIFGNIVDEVAYHEKYPTIYHLRKKLVDSTDKADLRLIYLALAHMIKFRGHFLIEGDLNPDNSDVDKLFIQLVQTYNQLFEENPINASGVDAKAILSARLSKSRRLENLIAQLPGEKKNGLFGNLIALSLGLTPNFKSNFDLAEDAKLQLSKDTYDDDLDNLLAQIGDQYADLFLAAKNLSDAILLSDILRVNTEITKAPLSASMIKRYDEHHQDLTLLKALVRQQLPEKYKEIFFDQSKNGYAGYIDGGASQEEFYKFIKPILEKMDGTEELLVKLNREDLLRKQRTFDNGSIPHQIHLGELHAILRRQEDFYPFLKDNREKIEKILTFRIPYYVGPLARGNSRFAWMTRKSEETITPWNFEEVVDKGASAQSFIERMTNFDKNLPNEKVLPKHSLLYEYFTVYNELTKVKYVTEGMRKPAFLSGEQKKAIVDLLFKTNRKVTVKQLKEDYFKKIECFDSVEISGVEDRFNASLGTYHDLLKIIKDKDFLDNEENEDILEDIVLTLTLFEDREMIEERLKTYAHLFDDKVMKQLKRRRYTGWGRLSRKLINGIRDKQSGKTILDFLKSDGFANRNFMQLIHDDSLTFKEDIQKAQVSGQGDSLHEHIANLAGSPAIKKGILQTVKVVDELVKVMGRHKPENIVIEMARENQTTQKGQKNSRERMKRIEEGIKELGSQILKEHPVENTQLQNEKLYLYYLQNGRDMYVDQELDINRLSDYDVDHIVPQSFLKDDSIDNKVLTRSDKNRGKSDNVPSEEVVKKMKNYWRQLLNAKLITQRKFDNLTKAERGGLSELDKAGFIKRQLVETRQITKHVAQILDSRMNTKYDENDKLIREVKVITLKSKLVSDFRKDFQFYKVREINNYHHAHDAYLNAVVGTALIKKYPKLESEFVYGDYKVYDVRKMIAKSEQEIGKATAKYFFYSNIMNFFKTEITLANGEIRKRPLIETNGETGEIVWDKGRDFATVRKVLSMPQVNIVKKTEVQTGGFSKESILPKRNSDKLIARKKDWDPKKYGGFDSPTVAYSVLVVAKVEKGKSKKLKSVKELLGITIMERSSFEKNPIDFLEAKGYKEVKKDLIIKLPKYSLFELENGRKRMLASAGELQKGNELALPSKYVNFLYLASHYEKLKGGSSGSETPGTSESATPESSGSEVEFSHEYWMRHALTLAKRARDEREVPVGAVLVLNNRVIGEGWNRAIGLHDPTAHAEIMALRQGGLVMQNYRLIDATLYVTFEPCVMCAGAMIHSRIGRVVFGVRNAKTGAAGSLMDVLHYPGMNHRVEITEGILADECAALLCYFFRMPRQVFNAQKKAQSSTDSPEDNEQKQLFVEQHKHYLDEIIEQISEFSKRVILADANLDKVLSAYNKHRDKPIREQAENIIHLFTLTNLGAPAAFKYFDTTIDRKRYTSTKEVLDATLIHQSITGLYETRIDLSQLGGD

SEQ ID NO: 269 - protein, 1554 aa, synthetic construct
  REGION 1..1554: note = 107 Cas9 TadAins 1054 polypeptide sequence
MDKKYSIGLAIGTNSVGWAVITDEYKVPSKKFKVLGNTDRHSIKKNLIGALLFDSGETAEATRLKRTARRRYTRRKNRICYLQEIFSNEMAKVDDSFFHRLEESFLVEEDKKHERHPIFGNIVDEVAYHEKYPTIYHLRKKLVDSTDKADLRLIYLALAHMIKFRGHFLIEGDLNPDNSDVDKLFIQLVQTYNQLFEENPINASGVDAKAILSARLSKSRRLENLIAQLPGEKKNGLFGNLIALSLGLTPNFKSNFDLAEDAKLQLSKDTYDDDLDNLLAQIGDQYADLFLAAKNLSDAILLSDILRVNTEITKAPLSASMIKRYDEHHQDLTLLKALVRQQLPEKYKEIFFDQSKNGYAGYIDGGASQEEFYKFIKPILEKMDGTEELLVKLNREDLLRKQRTFDNGSIPHQIHLGELHAILRRQEDFYPFLKDNREKIEKILTFRIPYYVGPLARGNSRFAWMTRKSEETITPWNFEEVVDKGASAQSFIERMTNFDKNLPNEKVLPKHSLLYEYFTVYNELTKVKYVTEGMRKPAFLSGEQKKAIVDLLFKTNRKVTVKQLKEDYFKKIECFDSVEISGVEDRFNASLGTYHDLLKIIKDKDFLDNEENEDILEDIVLTLTLFEDREMIEERLKTYAHLFDDKVMKQLKRRRYTGWGRLSRKLINGIRDKQSGKTILDFLKSDGFANRNFMQLIHDDSLTFKEDIQKAQVSGQGDSLHEHIANLAGSPAIKKGILQTVKVVDELVKVMGRHKPENIVIEMARENQTTQKGQKNSRERMKRIEEGIKELGSQILKEHPVENTQLQNEKLYLYYLQNGRDMYVDQELDINRLSDYDVDHIVPQSFLKDDSIDNKVLTRSDKNRGKSDNVPSEEVVKKMKNYWRQLLNAKLITQRKFDNLTKAERGGLSELDKAGFIKRQLVETRQITKHVAQILDSRMNTKYDENDKLIREVKVITLKSKLVSDFRKDFQFYKVREINNYHHAHDAYLNAVVGTALIKKYPKLESEFVYGDYKVYDVRKMIAKSEQEIGKATAKYFFYSNIMNFFKTEITLANGSSGSETPGTSESATPESSGSEVEFSHEYWMRHALTLAKRARDEREVPVGAVLVLNNRVIGEGWNRAIGLHDPTAHAEIMALRQGGLVMQNYRLIDATLYVTFEPCVMCAGAMIHSRIGRVVFGVRNAKTGAAGSLMDVLHYPGMNHRVEITEGILADECAALLCYFFRMPRQVFNAQKKAQSSTDGEIRKRPLIETNGETGEIVWDKGRDFATVRKVLSMPQVNIVKKTEVQTGGFSKESILPKRNSDKLIARKKDWDPKKYGGFDSPTVAYSVLVVAKVEKGKSKKLKSVKELLGITIMERSSFEKNPIDFLEAKGYKEVKKDLIIKLPKYSLFELENGRKRMLASAGELQKGNELALPSKYVNFLYLASHYEKLKGSPEDNEQKQLFVEQHKHYLDEIIEQISEFSKRVILADANLDKVLSAYNKHRDKPIREQAENIIHLFTLTNLGAPAAFKYFDTTIDRKRYTSTKEVLDATLIHQSITGLYETRIDLSQLGGD

SEQ ID NO: 270 - protein, 1554 aa, synthetic construct
  REGION 1..1554: note = 108 Cas9 TadAins 1026 polypeptide sequence
MDKKYSIGLAIGTNSVGWAVITDEYKVPSKKFKVLGNTDRHSIKKNLIGALLFDSGETAEATRLKRTARRRYTRRKNRICYLQEIFSNEMAKVDDSFFHRLEESFLVEEDKKHERHPIFGNIVDEVAYHEKYPTIYHLRKKLVDSTDKADLRLIYLALAHMIKFRGHFLIEGDLNPDNSDVDKLFIQLVQTYNQLFEENPINASGVDAKAILSARLSKSRRLENLIAQLPGEKKNGLFGNLIALSLGLTPNFKSNFDLAEDAKLQLSKDTYDDDLDNLLAQIGDQYADLFLAAKNLSDAILLSDILRVNTEITKAPLSASMIKRYDEHHQDLTLLKALVRQQLPEKYKEIFFDQSKNGYAGYIDGGASQEEFYKFIKPILEKMDGTEELLVKLNREDLLRKQRTFDNGSIPHQIHLGELHAILRRQEDFYPFLKDNREKIEKILTFRIPYYVGPLARGNSRFAWMTRKSEETITPWNFEEVVDKGASAQSFIERMTNFDKNLPNEKVLPKHSLLYEYFTVYNELTKVKYVTEGMRKPAFLSGEQKKAIVDLLFKTNRKVTVKQLKEDYFKKIECFDSVEISGVEDRFNASLGTYHDLLKIIKDKDFLDNEENEDILEDIVLTLTLFEDREMIEERLKTYAHLFDDKVMKQLKRRRYTGWGRLSRKLINGIRDKQSGKTILDFLKSDGFANRNFMQLIHDDSLTFKEDIQKAQVSGQGDSLHEHIANLAGSPAIKKGILQTVKVVDELVKVMGRHKPENIVIEMARENQTTQKGQKNSRERMKRIEEGIKELGSQILKEHPVENTQLQNEKLYLYYLQNGRDMYVDQELDINRLSDYDVDHIVPQSFLKDDSIDNKVLTRSDKNRGKSDNVPSEEVVKKMKNYWRQLLNAKLITQRKFDNLTKAERGGLSELDKAGFIKRQLVETRQITKHVAQILDSRMNTKYDENDKLIREVKVITLKSKLVSDFRKDFQFYKVREINNYHHAHDAYLNAVVGTALIKKYPKLESEFVYGDYKVYDVRKMIAKSEGSSGSETPGTSESATPESSGSEVEFSHEYWMRHALTLAKRARDEREVPVGAVLVLNNRVIGEGWNRAIGLHDPTAHAEIMALRQGGLVMQNYRLIDATLYVTFEPCVMCAGAMIHSRIGRVVFGVRNAKTGAAGSLMDVLHYPGMNHRVEITEGILADECAALLCYFFRMPRQVFNAQKKAQSSTDQEIGKATAKYFFYSNIMNFFKTEITLANGEIRKRPLIETNGETGEIVWDKGRDFATVRKVLSMPQVNIVKKTEVQTGGFSKESILPKRNSDKLIARKKDWDPKKYGGFDSPTVAYSVLVVAKVEKGKSKKLKSVKELLGITIMERSSFEKNPIDFLEAKGYKEVKKDLIIKLPKYSLFELENGRKRMLASAGELQKGNELALPSKYVNFLYLASHYEKLKGSPEDNEQKQLFVEQHKHYLDEIIEQISEFSKRVILADANLDKVLSAYNKHRDKPIREQAENIIHLFTLTNLGAPAAFKYFDTTIDRKRYTSTKEVLDATLIHQSITGLYETRIDLSQLGGD

SEQ ID NO: 271 - protein, 1540 aa, synthetic construct
  REGION 1..1540: note = 109 Cas9 TadAins 768 polypeptide sequence
MDKKYSIGLAIGTNSVGWAVITDEYKVPSKKFKVLGNTDRHSIKKNLIGALLFDSGETAEATRLKRTARRRYTRRKNRICYLQEIFSNEMAKVDDSFFHRLEESFLVEEDKKHERHPIFGNIVDEVAYHEKYPTIYHLRKKLVDSTDKADLRLIYLALAHMIKFRGHFLIEGDLNPDNSDVDKLFIQLVQTYNQLFEENPINASGVDAKAILSARLSKSRRLENLIAQLPGEKKNGLFGNLIALSLGLTPNFKSNFDLAEDAKLQLSKDTYDDDLDNLLAQIGDQYADLFLAAKNLSDAILLSDILRVNTEITKAPLSASMIKRYDEHHQDLTLLKALVRQQLPEKYKEIFFDQSKNGYAGYIDGGASQEEFYKFIKPILEKMDGTEELLVKLNREDLLRKQRTFDNGSIPHQIHLGELHAILRRQEDFYPFLKDNREKIEKILTFRIPYYVGPLARGNSRFAWMTRKSEETITPWNFEEVVDKGASAQSFIERMTNFDKNLPNEKVLPKHSLLYEYFTVYNELTKVKYVTEGMRKPAFLSGEQKKAIVDLLFKTNRKVTVKQLKEDYFKKIECFDSVEISGVEDRFNASLGTYHDLLKIIKDKDFLDNEENEDILEDIVLTLTLFEDREMIEERLKTYAHLFDDKVMKQLKRRRYTGWGRLSRKLINGIRDKQSGKTILDFLKSDGFANRNFMQLIHDDSLTFKEDIQKAQVSGQGDSLHEHIANLAGSPAIKKGILQTVKVVDELVKVMGRHKPENIVIEMARENQGSSGSETPGTSESATPESSGSEVEFSHEYWMRHALTLAKRARDEREVPVGAVLVLNNRVIGEGWNRAIGLHDPTAHAEIMALRQGGLVMQNYRLIDATLYVTFEPCVMCAGAMIHSRIGRVVFGVRNAKTGAAGSLMDVLHYPGMNHRVEITEGILADECAALLCYFFRMPRTTQKGQKNSRERMKRIEEGIKELGSQILKEHPVENTQLQNEKLYLYYLQNGRDMYVDQELDINRLSDYDVDHIVPQSFLKDDSIDNKVLTRSDKNRGKSDNVPSEEVVKKMKNYWRQLLNAKLITQRKFDNLTKAERGGLSELDKAGFIKRQLVETRQITKHVAQILDSRMNTKYDENDKLIREVKVITLKSKLVSDFRKDFQFYKVREINNYHHAHDAYLNAVVGTALIKKYPKLESEFVYGDYKVYDVRKMIAKSEQEIGKATAKYFFYSNIMNFFKTEITLANGEIRKRPLIETNGETGEIVWDKGRDFATVRKVLSMPQVNIVKKTEVQTGGFSKESILPKRNSDKLIARKKDWDPKKYGGFDSPTVAYSVLVVAKVEKGKSKKLKSVKELLGITIMERSSFEKNPIDFLEAKGYKEVKKDLIIKLPKYSLFELENGRKRMLASAGELQKGNELALPSKYVNFLYLASHYEKLKGSPEDNEQKQLFVEQHKHYLDEIIEQISEFSKRVILADANLDKVLSAYNKHRDKPIREQAENIIHLFTLTNLGAPAAFKYFDTTIDRKRYTSTKEVLDATLIHQSITGLYETRIDLSQLGGD

SEQ ID NO: 272 - protein, 1540 aa, synthetic construct
  REGION 1..1540: note = 110.1 Cas9 TadAins 1250 polypeptide sequence
MDKKYSIGLAIGTNSVGWAVITDEYKVPSKKFKVLGNTDRHSIKKNLIGALLFDSGETAEATRLKRTARRRYTRRKNRICYLQEIFSNEMAKVDDSFFHRLEESFLVEEDKKHERHPIFGNIVDEVAYHEKYPTIYHLRKKLVDSTDKADLRLIYLALAHMIKFRGHFLIEGDLNPDNSDVDKLFIQLVQTYNQLFEENPINASGVDAKAILSARLSKSRRLENLIAQLPGEKKNGLFGNLIALSLGLTPNFKSNFDLAEDAKLQLSKDTYDDDLDNLLAQIGDQYADLFLAAKNLSDAILLSDILRVNTEITKAPLSASMIKRYDEHHQDLTLLKALVRQQLPEKYKEIFFDQSKNGYAGYIDGGASQEEFYKFIKPILEKMDGTEELLVKLNREDLLRKQRTFDNGSIPHQIHLGELHAILRRQEDFYPFLKDNREKIEKILTFRIPYYVGPLARGNSRFAWMTRKSEETITPWNFEEVVDKGASAQSFIERMTNFDKNLPNEKVLPKHSLLYEYFTVYNELTKVKYVTEGMRKPAFLSGEQKKAIVDLLFKTNRKVTVKQLKEDYFKKIECFDSVEISGVEDRFNASLGTYHDLLKIIKDKDFLDNEENEDILEDIVLTLTLFEDREMIEERLKTYAHLFDDKVMKQLKRRRYTGWGRLSRKLINGIRDKQSGKTILDFLKSDGFANRNFMQLIHDDSLTFKEDIQKAQVSGQGDSLHEHIANLAGSPAIKKGILQTVKVVDELVKVMGRHKPENIVIEMARENQTTQKGQKNSRERMKRIEEGIKELGSQILKEHPVENTQLQNEKLYLYYLQNGRDMYVDQELDINRLSDYDVDHIVPQSFLKDDSIDNKVLTRSDKNRGKSDNVPSEEVVKKMKNYWRQLLNAKLITQRKFDNLTKAERGGLSELDKAGFIKRQLVETRQITKHVAQILDSRMNTKYDENDKLIREVKVITLKSKLVSDFRKDFQFYKVREINNYHHAHDAYLNAVVGTALIKKYPKLESEFVYGDYKVYDVRKMIAKSEQEIGKATAKYFFYSNIMNFFKTEITLANGEIRKRPLIETNGETGEIVWDKGRDFATVRKVLSMPQVNIVKKTEVQTGGFSKESILPKRNSDKLIARKKDWDPKKYGGFDSPTVAYSVLVVAKVEKGKSKKLKSVKELLGITIMERSSFEKNPIDFLEAKGYKEVKKDLIIKLPKYSLFELENGRKRMLASAGELQKGNELALPSKYVNFLYLASHYEKLKGSPGSSGSETPGTSESATPESSGSEVEFSHEYWMRHALTLAKRARDEREVPVGAVLVLNNRVIGEGWNRAIGLHDPTAHAEIMALRQGGLVMQNYRLIDATLYVTFEPCVMCAGAMIHSRIGRVVFGVRNAKTGAAGSLMDVLHYPGMNHRVEITEGILADECAALLCYFFRMPREDNEQKQLFVEQHKHYLDEIIEQISEFSKRVILADANLDKVLSAYNKHRDKPIREQAENIIHLFTLTNLGAPAAFKYFDTTIDRKRYTSTKEVLDATLIHQSITGLYETRIDLSQLGGD

SEQ ID NO: 273 - protein, 1543 aa, synthetic construct
  REGION 1..1543: note = 110.2 Cas9 TadAins 1250 polypeptide sequence
MDKKYSIGLAIGTNSVGWAVITDEYKVPSKKFKVLGNTDRHSIKKNLIGALLFDSGETAEATRLKRTARRRYTRRKNRICYLQEIFSNEMAKVDDSFFHRLEESFLVEEDKKHERHPIFGNIVDEVAYHEKYPTIYHLRKKLVDSTDKADLRLIYLALAHMIKFRGHFLIEGDLNPDNSDVDKLFIQLVQTYNQLFEENPINASGVDAKAILSARLSKSRRLENLIAQLPGEKKNGLFGNLIALSLGLTPNFKSNFDLAEDAKLQLSKDTYDDDLDNLLAQIGDQYADLFLAAKNLSDAILLSDILRVNTEITKAPLSASMIKRYDEHHQDLTLLKALVRQQLPEKYKEIFFDQSKNGYAGYIDGGASQEEFYKFIKPILEKMDGTEELLVKLNREDLLRKQRTFDNGSIPHQIHLGELHAILRRQEDFYPFLKDNREKIEKILTFRIPYYVGPLARGNSRFAWMTRKSEETITPWNFEEVVDKGASAQSFIERMTNFDKNLPNEKVLPKHSLLYEYFTVYNELTKVKYVTEGMRKPAFLSGEQKKAIVDLLFKTNRKVTVKQLKEDYFKKIECFDSVEISGVEDRFNASLGTYHDLLKIIKDKDFLDNEENEDILEDIVLTLTLFEDREMIEERLKTYAHLFDDKVMKQLKRRRYTGWGRLSRKLINGIRDKQSGKTILDFLKSDGFANRNFMQLIHDDSLTFKEDIQKAQVSGQGDSLHEHIANLAGSPAIKKGILQTVKVVDELVKVMGRHKPENIVIEMARENQTTQKGQKNSRERMKRIEEGIKELGSQILKEHPVENTQLQNEKLYLYYLQNGRDMYVDQELDINRLSDYDVDHIVPQSFLKDDSIDNKVLTRSDKNRGKSDNVPSEEVVKKMKNYWRQLLNAKLITQRKFDNLTKAERGGLSELDKAGFIKRQLVETRQITKHVAQILDSRMNTKYDENDKLIREVKVITLKSKLVSDFRKDFQFYKVREINNYHHAHDAYLNAVVGTALIKKYPKLESEFVYGDYKVYDVRKMIAKSEQEIGKATAKYFFYSNIMNFFKTEITLANGEIRKRPLIETNGETGEIVWDKGRDFATVRKVLSMPQVNIVKKTEVQTGGFSKESILPKRNSDKLIARKKDWDPKKYGGFDSPTVAYSVLVVAKVEKGKSKKLKSVKELLGITIMERSSFEKNPIDFLEAKGYKEVKKDLIIKLPKYSLFELENGRKRMLASAGELQKGNELALPSKYVNFLYLASHYEKLKGSPGSSGSSGSETPGTSESATPESSGSEVEFSHEYWMRHALTLAKRARDEREVPVGAVLVLNNRVIGEGWNRAIGLHDPTAHAEIMALRQGGLVMQNYRLIDATLYVTFEPCVMCAGAMIHSRIGRVVFGVRNAKTGAAGSLMDVLHYPGMNHRVEITEGILADECAALLCYFFRMPREDNEQKQLFVEQHKHYLDEIIEQISEFSKRVILADANLDKVLSAYNKHRDKPIREQAENIIHLFTLTNLGAPAAFKYFDTTIDRKRYTSTKEVLDATLIHQSITGLYETRIDLSQLGGD

SEQ ID NO: 274 - protein, 1546 aa, synthetic construct
  REGION 1..1546: note = 110.3 Cas9 TadAins 1250 polypeptide sequence
MDKKYSIGLAIGTNSVGWAVITDEYKVPSKKFKVLGNTDRHSIKKNLIGALLFDSGETAEATRLKRTARRRYTRRKNRICYLQEIFSNEMAKVDDSFFHRLEESFLVEEDKKHERHPIFGNIVDEVAYHEKYPTIYHLRKKLVDSTDKADLRLIYLALAHMIKFRGHFLIEGDLNPDNSDVDKLFIQLVQTYNQLFEENPINASGVDAKAILSARLSKSRRLENLIAQLPGEKKNGLFGNLIALSLGLTPNFKSNFDLAEDAKLQLSKDTYDDDLDNLLAQIGDQYADLFLAAKNLSDAILLSDILRVNTEITKAPLSASMIKRYDEHHQDLTLLKALVRQQLPEKYKEIFFDQSKNGYAGYIDGGASQEEFYKFIKPILEKMDGTEELLVKLNREDLLRKQRTFDNGSIPHQIHLGELHAILRRQEDFYPFLKDNREKIEKILTFRIPYYVGPLARGNSRFAWMTRKSEETITPWNFEEVVDKGASAQSFIERMTNFDKNLPNEKVLPKHSLLYEYFTVYNELTKVKYVTEGMRKPAFLSGEQKKAIVDLLFKTNRKVTVKQLKEDYFKKIECFDSVEISGVEDRFNASLGTYHDLLKIIKDKDFLDNEENEDILEDIVLTLTLFEDREMIEERLKTYAHLFDDKVMKQLKRRRYTGWGRLSRKLINGIRDKQSGKTILDFLKSDGFANRNFMQLIHDDSLTFKEDIQKAQVSGQGDSLHEHIANLAGSPAIKKGILQTVKVVDELVKVMGRHKPENIVIEMARENQTTQKGQKNSRERMKRIEEGIKELGSQILKEHPVENTQLQNEKLYLYYLQNGRDMYVDQELDINRLSDYDVDHIVPQSFLKDDSIDNKVLTRSDKNRGKSDNVPSEEVVKKMKNYWRQLLNAKLITQRKFDNLTKAERGGLSELDKAGFIKRQLVETRQITKHVAQILDSRMNTKYDENDKLIREVKVITLKSKLVSDFRKDFQFYKVREINNYHHAHDAYLNAVVGTALIKKYPKLESEFVYGDYKVYDVRKMIAKSEQEIGKATAKYFFYSNIMNFFKTEITLANGEIRKRPLIETNGETGEIVWDKGRDFATVRKVLSMPQVNIVKKTEVQTGGFSKESILPKRNSDKLIARKKDWDPKKYGGFDSPTVAYSVLVVAKVEKGKSKKLKSVKELLGITIMERSSFEKNPIDFLEAKGYKEVKKDLIIKLPKYSLFELENGRKRMLASAGELQKGNELALPSKYVNFLYLASHYEKLKGSPGSSGSSGSETPGTSESATPESGSSSGSEVEFSHEYWMRHALTLAKRARDEREVPVGAVLVLNNRVIGEGWNRAIGLHDPTAHAEIMALRQGGLVMQNYRLIDATLYVTFEPCVMCAGAMIHSRIGRVVFGVRNAKTGAAGSLMDVLHYPGMNHRVEITEGILADECAALLCYFFRMPREDNEQKQLFVEQHKHYLDEIIEQISEFSKRVILADANLDKVLSAYNKHRDKPIREQAENIIHLFTLTNLGAPAAFKYFDTTIDRKRYTSTKEVLDATLIHQSITGLYETRIDLSQLGGD

SEQ ID NO: 275 - protein, 1546 aa, synthetic construct
  REGION 1..1546: note = 110.4 Cas9 TadAins 1250 polypeptide sequence
MDKKYSIGLAIGTNSVGWAVITDEYKVPSKKFKVLGNTDRHSIKKNLIGALLFDSGETAEATRLKRTARRRYTRRKNRICYLQEIFSNEMAKVDDSFFHRLEESFLVEEDKKHERHPIFGNIVDEVAYHEKYPTIYHLRKKLVDSTDKADLRLIYLALAHMIKFRGHFLIEGDLNPDNSDVDKLFIQLVQTYNQLFEENPINASGVDAKAILSARLSKSRRLENLIAQLPGEKKNGLFGNLIALSLGLTPNFKSNFDLAEDAKLQLSKDTYDDDLDNLLAQIGDQYADLFLAAKNLSDAILLSDILRVNTEITKAPLSASMIKRYDEHHQDLTLLKALVRQQLPEKYKEIFFDQSKNGYAGYIDGGASQEEFYKFIKPILEKMDGTEELLVKLNREDLLRKQRTFDNGSIPHQIHLGELHAILRRQEDFYPFLKDNREKIEKILTFRIPYYVGPLARGNSRFAWMTRKSEETITPWNFEEVVDKGASAQSFIERMTNFDKNLPNEKVLPKHSLLYEYFTVYNELTKVKYVTEGMRKPAFLSGEQKKAIVDLLFKTNRKVTVKQLKEDYFKKIECFDSVEISGVEDRFNASLGTYHDLLKIIKDKDFLDNEENEDILEDIVLTLTLFEDREMIEERLKTYAHLFDDKVMKQLKRRRYTGWGRLSRKLINGIRDKQSGKTILDFLKSDGFANRNFMQLIHDDSLTFKEDIQKAQVSGQGDSLHEHIANLAGSPAIKKGILQTVKVVDELVKVMGRHKPENIVIEMARENQTTQKGQKNSRERMKRIEEGIKELGSQILKEHPVENTQLQNEKLYLYYLQNGRDMYVDQELDINRLSDYDVDHIVPQSFLKDDSIDNKVLTRSDKNRGKSDNVPSEEVVKKMKNYWRQLLNAKLITQRKFDNLTKAERGGLSELDKAGFIKRQLVETRQITKHVAQILDSRMNTKYDENDKLIREVKVITLKSKLVSDFRKDFQFYKVREINNYHHAHDAYLNAVVGTALIKKYPKLESEFVYGDYKVYDVRKMIAKSEQEIGKATAKYFFYSNIMNFFKTEITLANGEIRKRPLIETNGETGEIVWDKGRDFATVRKVLSMPQVNIVKKTEVQTGGFSKESILPKRNSDKLIARKKDWDPKKYGGFDSPTVAYSVLVVAKVEKGKSKKLKSVKELLGITIMERSSFEKNPIDFLEAKGYKEVKKDLIIKLPKYSLFELENGRKRMLASAGELQKGNELALPSKYVNFLYLASHYEKLKGSPGSSGSSGSETPGTSESATPESGSSSGSEVEFSHEYWMRHALTLAKRARDEREVPVGAVLVLNNRVIGEGWNRAIGLHDPTAHAEIMALRQGGLVMQNYRLIDATLYVTFEPCVMCAGAMIHSRIGRVVFGVRNAKTGAAGSLMDVLHYPGMNHRVEITEGILADECAALLCYFFRMRREDNEQKQLFVEQHKHYLDEIIEQISEFSKRVILADANLDKVLSAYNKHRDKPIREQAENIIHLFTLTNLGAPAAFKYFDTTIDRKRYTSTKEVLDATLIHQSITGLYETRIDLSQLGGD

SEQ ID NO: 276 - protein, 1546 aa, synthetic construct
  REGION 1..1546: note = 110.5 Cas9 TadAins 1249 polypeptide sequence
MDKKYSIGLAIGTNSVGWAVITDEYKVPSKKFKVLGNTDRHSIKKNLIGALLFDSGETAEATRLKRTARRRYTRRKNRICYLQEIFSNEMAKVDDSFFHRLEESFLVEEDKKHERHPIFGNIVDEVAYHEKYPTIYHLRKKLVDSTDKADLRLIYLALAHMIKFRGHFLIEGDLNPDNSDVDKLFIQLVQTYNQLFEENPINASGVDAKAILSARLSKSRRLENLIAQLPGEKKNGLFGNLIALSLGLTPNFKSNFDLAEDAKLQLSKDTYDDDLDNLLAQIGDQYADLFLAAKNLSDAILLSDILRVNTEITKAPLSASMIKRYDEHHQDLTLLKALVRQQLPEKYKEIFFDQSKNGYAGYIDGGASQEEFYKFIKPILEKMDGTEELLVKLNREDLLRKQRTFDNGSIPHQIHLGELHAILRRQEDFYPFLKDNREKIEKILTFRIPYYVGPLARGNSRFAWMTRKSEETITPWNFEEVVDKGASAQSFIERMTNFDKNLPNEKVLPKHSLLYEYFTVYNELTKVKYVTEGMRKPAFLSGEQKKAIVDLLFKTNRKVTVKQLKEDYFKKIECFDSVEISGVEDRFNASLGTYHDLLKIIKDKDFLDNEENEDILEDIVLTLTLFEDREMIEERLKTYAHLFDDKVMKQLKRRRYTGWGRLSRKLINGIRDKQSGKTILDFLKSDGFANRNFMQLIHDDSLTFKEDIQKAQVSGQGDSLHEHIANLAGSPAIKKGILQTVKVVDELVKVMGRHKPENIVIEMARENQTTQKGQKNSRERMKRIEEGIKELGSQILKEHPVENTQLQNEKLYLYYLQNGRDMYVDQELDINRLSDYDVDHIVPQSFLKDDSIDNKVLTRSDKNRGKSDNVPSEEVVKKMKNYWRQLLNAKLITQRKFDNLTKAERGGLSELDKAGFIKRQLVETRQITKHVAQILDSRMNTKYDENDKLIREVKVITLKSKLVSDFRKDFQFYKVREINNYHHAHDAYLNAVVGTALIKKYPKLESEFVYGDYKVYDVRKMIAKSEQEIGKATAKYFFYSNIMNFFKTEITLANGEIRKRPLIETNGETGEIVWDKGRDFATVRKVLSMPQVNIVKKTEVQTGGFSKESILPKRNSDKLIARKKDWDPKKYGGFDSPTVAYSVLVVAKVEKGKSKKLKSVKELLGITIMERSSFEKNPIDFLEAKGYKEVKKDLIIKLPKYSLFELENGRKRMLASAGELQKGNELALPSKYVNFLYLASHYEKLKGSGSSGSSGSETPGTSESATPESGSSSGSEVEFSHEYWMRHALTLAKRARDEREVPVGAVLVLNNRVIGEGWNRAIGLHDPTAHAEIMALRQGGLVMQNYRLIDATLYVTFEPCVMCAGAMIHSRIGRVVFGVRNAKTGAAGSLMDVLHYPGMNHRVEITEGILADECAALLCYFFRMRRPEDNEQKQLFVEQHKHYLDEIIEQISEFSKRVILADANLDKVLSAYNKHRDKPIREQAENIIHLFTLTNLGAPAAFKYFDTTIDRKRYTSTKEVLDATLIHQSITGLYETRIDLSQLGGD

SEQ ID NO: 277 - protein, 1551 aa, synthetic construct
  REGION 1..1551: note = 110.5 Cas9 TadAins delta59-66 1250 polypeptide sequence
MDKKYSIGLAIGTNSVGWAVITDEYKVPSKKFKVLGNTDRHSIKKNLIGALLFDSGETAEATRLKRTARRRYTRRKNRICYLQEIFSNEMAKVDDSFFHRLEESFLVEEDKKHERHPIFGNIVDEVAYHEKYPTIYHLRKKLVDSTDKADLRLIYLALAHMIKFRGHFLIEGDLNPDNSDVDKLFIQLVQTYNQLFEENPINASGVDAKAILSARLSKSRRLENLIAQLPGEKKNGLFGNLIALSLGLTPNFKSNFDLAEDAKLQLSKDTYDDDLDNLLAQIGDQYADLFLAAKNLSDAILLSDILRVNTEITKAPLSASMIKRYDEHHQDLTLLKALVRQQLPEKYKEIFFDQSKNGYAGYIDGGASQEEFYKFIKPILEKMDGTEELLVKLNREDLLRKQRTFDNGSIPHQIHLGELHAILRRQEDFYPFLKDNREKIEKILTFRIPYYVGPLARGNSRFAWMTRKSEETITPWNFEEVVDKGASAQSFIERMTNFDKNLPNEKVLPKHSLLYEYFTVYNELTKVKYVTEGMRKPAFLSGEQKKAIVDLLFKTNRKVTVKQLKEDYFKKIECFDSVEISGVEDRFNASLGTYHDLLKIIKDKDFLDNEENEDILEDIVLTLTLFEDREMIEERLKTYAHLFDDKVMKQLKRRRYTGWGRLSRKLINGIRDKQSGKTILDFLKSDGFANRNFMQLIHDDSLTFKEDIQKAQVSGQGDSLHEHIANLAGSPAIKKGILQTVKVVDELVKVMGRHKPENIVIEMARENQTTQKGQKNSRERMKRIEEGIKELGSQILKEHPVENTQLQNEKLYLYYLQNGRDMYVDQELDINRLSDYDVDHIVPQSFLKDDSIDNKVLTRSDKNRGKSDNVPSEEVVKKMKNYWRQLLNAKLITQRKFDNLTKAERGGLSELDKAGFIKRQLVETRQITKHVAQILDSRMNTKYDENDKLIREVKVITLKSKLVSDFRKDFQFYKVREINNYHHAHDAYLNAVVGTALIKKYPKLESEFVYGDYKVYDVRKMIAKSEQEIGKATAKYFFYSNIMNFFKTEITLANGEIRKRPLIETNGETGEIVWDKGRDFATVRKVLSMPQVNIVKKTEVQTGGFSKESILPKRNSDKLIARKKDWDPKKYGGFDSPTVAYSVLVVAKVEKGKSKKLKSVKELLGITIMERSSFEKNPIDFLEAKGYKEVKKDLIIKLPKYSLFELENGRKRMLASAGELQKGNELALPSKYVNFLYLASHYEKLKGSPGSSGSSGSETPGTSESATPESGSSGSEVEFSHEYWMRHALTLAKRARDEREVPVGAVLVLNNRVIGEGWNRAHAEIMALRQGGLVMQNYRLIDATLYVTFEPCVMCAGAMIHSRIGRVVFGVRNAKTGAAGSLMDVLHYPGMNHRVEITEGILADECAALLCYFFRMPRQVFNAQKKAQSSTDEDNEQKQLFVEQHKHYLDEIIEQISEFSKRVILADANLDKVLSAYNKHRDKPIREQAENIIHLFTLTNLGAPAAFKYFDTTIDRKRYTSTKEVLDATLIHQSITGLYETRIDLSQLGGD

SEQ ID NO: 278 - protein, 1546 aa, synthetic construct
  REGION 1..1546: note = 110.6 Cas9 TadAins 1251 polypeptide sequence
MDKKYSIGLAIGTNSVGWAVITDEYKVPSKKFKVLGNTDRHSIKKNLIGALLFDSGETAEATRLKRTARRRYTRRKNRICYLQEIFSNEMAKVDDSFFHRLEESFLVEEDKKHERHPIFGNIVDEVAYHEKYPTIYHLRKKLVDSTDKADLRLIYLALAHMIKFRGHFLIEGDLNPDNSDVDKLFIQLVQTYNQLFEENPINASGVDAKAILSARLSKSRRLENLIAQLPGEKKNGLFGNLIALSLGLTPNFKSNFDLAEDAKLQLSKDTYDDDLDNLLAQIGDQYADLFLAAKNLSDAILLSDILRVNTEITKAPLSASMIKRYDEHHQDLTLLKALVRQQLPEKYKEIFFDQSKNGYAGYIDGGASQEEFYKFIKPILEKMDGTEELLVKLNREDLLRKQRTFDNGSIPHQIHLGELHAILRRQEDFYPFLKDNREKIEKILTFRIPYYVGPLARGNSRFAWMTRKSEETITPWNFEEVVDKGASAQSFIERMTNFDKNLPNEKVLPKHSLLYEYFTVYNELTKVKYVTEGMRKPAFLSGEQKKAIVDLLFKTNRKVTVKQLKEDYFKKIECFDSVEISGVEDRFNASLGTYHDLLKIIKDKDFLDNEENEDILEDIVLTLTLFEDREMIEERLKTYAHLFDDKVMKQLKRRRYTGWGRLSRKLINGIRDKQSGKTILDFLKSDGFANRNFMQLIHDDSLTFKEDIQKAQVSGQGDSLHEHIANLAGSPAIKKGILQTVKVVDELVKVMGRHKPENIVIEMARENQTTQKGQKNSRERMKRIEEGIKELGSQILKEHPVENTQLQNEKLYLYYLQNGRDMYVDQELDINRLSDYDVDHIVPQSFLKDDSIDNKVLTRSDKNRGKSDNVPSEEVVKKMKNYWRQLLNAKLITQRKFDNLTKAERGGLSELDKAGFIKRQLVETRQITKHVAQILDSRMNTKYDENDKLIREVKVITLKSKLVSDFRKDFQFYKVREINNYHHAHDAYLNAVVGTALIKKYPKLESEFVYGDYKVYDVRKMIAKSEQEIGKATAKYFFYSNIMNFFKTEITLANGEIRKRPLIETNGETGEIVWDKGRDFATVRKVLSMPQVNIVKKTEVQTGGFSKESILPKRNSDKLIARKKDWDPKKYGGFDSPTVAYSVLVVAKVEKGKSKKLKSVKELLGITIMERSSFEKNPIDFLEAKGYKEVKKDLIIKLPKYSLFELENGRKRMLASAGELQKGNELALPSKYVNFLYLASHYEKLKGSPEGSSGSSGSETPGTSESATPESGSSSGSEVEFSHEYWMRHALTLAKRARDEREVPVGAVLVLNNRVIGEGWNRAIGLHDPTAHAEIMALRQGGLVMQNYRLIDATLYVTFEPCVMCAGAMIHSRIGRVVFGVRNAKTGAAGSLMDVLHYPGMNHRVEITEGILADECAALLCYFFRMRRDNEQKQLFVEQHKHYLDEIIEQISEFSKRVILADANLDKVLSAYNKHRDKPIREQAENIIHLFTLTNLGAPAAFKYFDTTIDRKRYTSTKEVLDATLIHQSITGLYETRIDLSQLGGD

SEQ ID NO: 279 - protein, 1546 aa, synthetic construct
  REGION 1..1546: note = 110.7 Cas9 TadAins 1252 polypeptide sequence
MDKKYSIGLAIGTNSVGWAVITDEYKVPSKKFKVLGNTDRHSIKKNLIGALLFDSGETAEATRLKRTARRRYTRRKNRICYLQEIFSNEMAKVDDSFFHRLEESFLVEEDKKHERHPIFGNIVDEVAYHEKYPTIYHLRKKLVDSTDKADLRLIYLALAHMIKFRGHFLIEGDLNPDNSDVDKLFIQLVQTYNQLFEENPINASGVDAKAILSARLSKSRRLENLIAQLPGEKKNGLFGNLIALSLGLTPNFKSNFDLAEDAKLQLSKDTYDDDLDNLLAQIGDQYADLFLAAKNLSDAILLSDILRVNTEITKAPLSASMIKRYDEHHQDLTLLKALVRQQLPEKYKEIFFDQSKNGYAGYIDGGASQEEFYKFIKPILEKMDGTEELLVKLNREDLLRKQRTFDNGSIPHQIHLGELHAILRRQEDFYPFLKDNREKIEKILTFRIPYYVGPLARGNSRFAWMTRKSEETITPWNFEEVVDKGASAQSFIERMTNFDKNLPNEKVLPKHSLLYEYFTVYNELTKVKYVTEGMRKPAFLSGEQKKAIVDLLFKTNRKVTVKQLKEDYFKKIECFDSVEISGVEDRFNASLGTYHDLLKIIKDKDFLDNEENEDILEDIVLTLTLFEDREMIEERLKTYAHLFDDKVMKQLKRRRYTGWGRLSRKLINGIRDKQSGKTILDFLKSDGFANRNFMQLIHDDSLTFKEDIQKAQVSGQGDSLHEHIANLAGSPAIKKGILQTVKVVDELVKVMGRHKPENIVIEMARENQTTQKGQKNSRERMKRIEEGIKELGSQILKEHPVENTQLQNEKLYLYYLQNGRDMYVDQELDINRLSDYDVDHIVPQSFLKDDSIDNKVLTRSDKNRGKSDNVPSEEVVKKMKNYWRQLLNAKLITQRKFDNLTKAERGGLSELDKAGFIKRQLVETRQITKHVAQILDSRMNTKYDENDKLIREVKVITLKSKLVSDFRKDFQFYKVREINNYHHAHDAYLNAVVGTALIKKYPKLESEFVYGDYKVYDVRKMIAKSEQEIGKATAKYFFYSNIMNFFKTEITLANGEIRKRPLIETNGETGEIVWDKGRDFATVRKVLSMPQVNIVKKTEVQTGGFSKESILPKRNSDKLIARKKDWDPKKYGGFDSPTVAYSVLVVAKVEKGKSKKLKSVKELLGITIMERSSFEKNPIDFLEAKGYKEVKKDLIIKLPKYSLFELENGRKRMLASAGELQKGNELALPSKYVNFLYLASHYEKLKGSPEDGSSGSSGSETPGTSESATPESGSSSGSEVEFSHEYWMRHALTLAKRARDEREVPVGAVLVLNNRVIGEGWNRAIGLHDPTAHAEIMALRQGGLVMQNYRLIDATLYVTFEPCVMCAGAMIHSRIGRVVFGVRNAKTGAAGSLMDVLHYPGMNHRVEITEGILADECAALLCYFFRMRRNEQKQLFVEQHKHYLDEIIEQISEFSKRVILADANLDKVLSAYNKHRDKPIREQAENIIHLFTLTNLGAPAAFKYFDTTIDRKRYTSTKEVLDATLIHQSITGLYETRIDLSQLGGD

SEQ ID NO: 280 - protein, 1533 aa, synthetic construct
  REGION 1..1533: note = 110.8 Cas9 TadAins delta59-66 C-truncate 1250 polypeptide sequence
MDKKYSIGLAIGTNSVGWAVITDEYKVPSKKFKVLGNTDRHSIKKNLIGALLFDSGETAEATRLKRTARRRYTRRKNRICYLQEIFSNEMAKVDDSFFHRLEESFLVEEDKKHERHPIFGNIVDEVAYHEKYPTIYHLRKKLVDSTDKADLRLIYLALAHMIKFRGHFLIEGDLNPDNSDVDKLFIQLVQTYNQLFEENPINASGVDAKAILSARLSKSRRLENLIAQLPGEKKNGLFGNLIALSLGLTPNFKSNFDLAEDAKLQLSKDTYDDDLDNLLAQIGDQYADLFLAAKNLSDAILLSDILRVNTEITKAPLSASMIKRYDEHHQDLTLLKALVRQQLPEKYKEIFFDQSKNGYAGYIDGGASQEEFYKFIKPILEKMDGTEELLVKLNREDLLRKQRTFDNGSIPHQIHLGELHAILRRQEDFYPFLKDNREKIEKILTFRIPYYVGPLARGNSRFAWMTRKSEETITPWNFEEVVDKGASAQSFIERMTNFDKNLPNEKVLPKHSLLYEYFTVYNELTKVKYVTEGMRKPAFLSGEQKKAIVDLLFKTNRKVTVKQLKEDYFKKIECFDSVEISGVEDRFNASLGTYHDLLKIIKDKDFLDNEENEDILEDIVLTLTLFEDREMIEERLKTYAHLFDDKVMKQLKRRRYTGWGRLSRKLINGIRDKQSGKTILDFLKSDGFANRNFMQLIHDDSLTFKEDIQKAQVSGQGDSLHEHIANLAGSPAIKKGILQTVKVVDELVKVMGRHKPENIVIEMARENQTTQKGQKNSRERMKRIEEGIKELGSQILKEHPVENTQLQNEKLYLYYLQNGRDMYVDQELDINRLSDYDVDHIVPQSFLKDDSIDNKVLTRSDKNRGKSDNVPSEEVVKKMKNYWRQLLNAKLITQRKFDNLTKAERGGLSELDKAGFIKRQLVETRQITKHVAQILDSRMNTKYDENDKLIREVKVITLKSKLVSDFRKDFQFYKVREINNYHHAHDAYLNAVVGTALIKKYPKLESEFVYGDYKVYDVRKMIAKSEQEIGKATAKYFFYSNIMNFFKTEITLANGEIRKRPLIETNGETGEIVWDKGRDFATVRKVLSMPQVNIVKKTEVQTGGFSKESILPKRNSDKLIARKKDWDPKKYGGFDSPTVAYSVLVVAKVEKGKSKKLKSVKELLGITIMERSSFEKNPIDFLEAKGYKEVKKDLIIKLPKYSLFELENGRKRMLASAGELQKGNELALPSKYVNFLYLASHYEKLKGSPGSSGSETPGTSESATPESSGSEVEFSHEYWMRHALTLAKRARDEREVPVGAVLVLNNRVIGEGWNRAHAEIMALRQGGLVMQNYRLIDATLYVTFEPCVMCAGAMIHSRIGRVVFGVRNAKTGAAGSLMDVLHYPGMNHRVEITEGILADECAALLCYFFRMPRQEDNEQKQLFVEQHKHYLDEIIEQISEFSKRVILADANLDKVLSAYNKHRDKPIREQAENIIHLFTLTNLGAPAAFKYFDTTIDRKRYTSTKEVLDATLIHQSITGLYETRIDLSQLGGD

SEQ ID NO: 281 - protein, 1549 aa, synthetic construct
  REGION 1..1549: note = 111.1 Cas9 TadAins 997 polypeptide sequence
MDKKYSIGLAIGTNSVGWAVITDEYKVPSKKFKVLGNTDRHSIKKNLIGALLFDSGETAEATRLKRTARRRYTRRKNRICYLQEIFSNEMAKVDDSFFHRLEESFLVEEDKKHERHPIFGNIVDEVAYHEKYPTIYHLRKKLVDSTDKADLRLIYLALAHMIKFRGHFLIEGDLNPDNSDVDKLFIQLVQTYNQLFEENPINASGVDAKAILSARLSKSRRLENLIAQLPGEKKNGLFGNLIALSLGLTPNFKSNFDLAEDAKLQLSKDTYDDDLDNLLAQIGDQYADLFLAAKNLSDAILLSDILRVNTEITKAPLSASMIKRYDEHHQDLTLLKALVRQQLPEKYKEIFFDQSKNGYAGYIDGGASQEEFYKFIKPILEKMDGTEELLVKLNREDLLRKQRTFDNGSIPHQIHLGELHAILRRQEDFYPFLKDNREKIEKILTFRIPYYVGPLARGNSRFAWMTRKSEETITPWNFEEVVDKGASAQSFIERMTNFDKNLPNEKVLPKHSLLYEYFTVYNELTKVKYVTEGMRKPAFLSGEQKKAIVDLLFKTNRKVTVKQLKEDYFKKIECFDSVEISGVEDRFNASLGTYHDLLKIIKDKDFLDNEENEDILEDIVLTLTLFEDREMIEERLKTYAHLFDDKVMKQLKRRRYTGWGRLSRKLINGIRDKQSGKTILDFLKSDGFANRNFMQLIHDDSLTFKEDIQKAQVSGQGDSLHEHIANLAGSPAIKKGILQTVKVVDELVKVMGRHKPENIVIEMARENQTTQKGQKNSRERMKRIEEGIKELGSQILKEHPVENTQLQNEKLYLYYLQNGRDMYVDQELDINRLSDYDVDHIVPQSFLKDDSIDNKVLTRSDKNRGKSDNVPSEEVVKKMKNYWRQLLNAKLITQRKFDNLTKAERGGLSELDKAGFIKRQLVETRQITKHVAQILDSRMNTKYDENDKLIREVKVITLKSKLVSDFRKDFQFYKVREINNYHHAHDAYLNAVVGTALSHEYWMRHALTLAKRARDEREVPVGAVLVLNNRVIGEGWNRAIGLHDPTAHAEIMALRQGGLVMQNYRLIDATLYVTFEPCVMCAGAMIHSRIGRVVFGVRNAKTGAAGSLMDVLHYPGMNHRVEITEGILADECAALLCYFFRMPRQVFNAQKKAQSSTDGSSGSETPGTSESATPESSGIKKYPKLESEFVYGDYKVYDVRKMIAKSEQEIGKATAKYFFYSNIMNFFKTEITLANGEIRKRPLIETNGETGEIVWDKGRDFATVRKVLSMPQVNIVKKTEVQTGGFSKESILPKRNSDKLIARKKDWDPKKYGGFDSPTVAYSVLVVAKVEKGKSKKLKSVKELLGITIMERSSFEKNPIDFLEAKGYKEVKKDLIIKLPKYSLFELENGRKRMLASAGELQKGNELALPSKYVNFLYLASHYEKLKGSPEDNEQKQLFVEQHKHYLDEIIEQISEFSKRVILADANLDKVLSAYNKHRDKPIREQAENIIHLFTLTNLGAPAAFKYFDTTIDRKRYTSTKEVLDATLIHQSITGLYETRIDLSQLGGD

SEQ ID NO: 282 - protein, 1555 aa, synthetic construct
  REGION 1..1555: note = 111.2 Cas9 TadAins 997 polypeptide sequence
MDKKYSIGLAIGTNSVGWAVITDEYKVPSKKFKVLGNTDRHSIKKNLIGALLFDSGETAEATRLKRTARRRYTRRKNRICYLQEIFSNEMAKVDDSFFHRLEESFLVEEDKKHERHPIFGNIVDEVAYHEKYPTIYHLRKKLVDSTDKADLRLIYLALAHMIKFRGHFLIEGDLNPDNSDVDKLFIQLVQTYNQLFEENPINASGVDAKAILSARLSKSRRLENLIAQLPGEKKNGLFGNLIALSLGLTPNFKSNFDLAEDAKLQLSKDTYDDDLDNLLAQIGDQYADLFLAAKNLSDAILLSDILRVNTEITKAPLSASMIKRYDEHHQDLTLLKALVRQQLPEKYKEIFFDQSKNGYAGYIDGGASQEEFYKFIKPILEKMDGTEELLVKLNREDLLRKQRTFDNGSIPHQIHLGELHAILRRQEDFYPFLKDNREKIEKILTFRIPYYVGPLARGNSRFAWMTRKSEETITPWNFEEVVDKGASAQSFIERMTNFDKNLPNEKVLPKHSLLYEYFTVYNELTKVKYVTEGMRKPAFLSGEQKKAIVDLLFKTNRKVTVKQLKEDYFKKIECFDSVEISGVEDRFNASLGTYHDLLKIIKDKDFLDNEENEDILEDIVLTLTLFEDREMIEERLKTYAHLFDDKVMKQLKRRRYTGWGRLSRKLINGIRDKQSGKTILDFLKSDGFANRNFMQLIHDDSLTFKEDIQKAQVSGQGDSLHEHIANLAGSPAIKKGILQTVKVVDELVKVMGRHKPENIVIEMARENQTTQKGQKNSRERMKRIEEGIKELGSQILKEHPVENTQLQNEKLYLYYLQNGRDMYVDQELDINRLSDYDVDHIVPQSFLKDDSIDNKVLTRSDKNRGKSDNVPSEEVVKKMKNYWRQLLNAKLITQRKFDNLTKAERGGLSELDKAGFIKRQLVETRQITKHVAQILDSRMNTKYDENDKLIREVKVITLKSKLVSDFRKDFQFYKVREINNYHHAHDAYLNAVVGTALSHEYWMRHALTLAKRARDEREVPVGAVLVLNNRVIGEGWNRAIGLHDPTAHAEIMALRQGGLVMQNYRLIDATLYVTFEPCVMCAGAMIHSRIGRVVFGVRNAKTGAAGSLMDVLHYPGMNHRVEITEGILADECAALLCYFFRMPRQVFNAQKKAQSSTDGSSGSSGSETPGTSESATPESSGGSSIKKYPKLESEFVYGDYKVYDVRKMIAKSEQEIGKATAKYFFYSNIMNFFKTEITLANGEIRKRPLIETNGETGEIVWDKGRDFATVRKVLSMPQVNIVKKTEVQTGGFSKESILPKRNSDKLIARKKDWDPKKYGGFDSPTVAYSVLVVAKVEKGKSKKLKSVKELLGITIMERSSFEKNPIDFLEAKGYKEVKKDLIIKLPKYSLFELENGRKRMLASAGELQKGNELALPSKYVNFLYLASHYEKLKGSPEDNEQKQLFVEQHKHYLDEIIEQISEFSKRVILADANLDKVLSAYNKHRDKPIREQAENIIHLFTLTNLGAPAAFKYFDTTIDRKRYTSTKEVLDATLIHQSITGLYETRIDLSQLGGD

SEQ ID NO: 283 - protein, 1421 aa, synthetic construct
  REGION 1..1421: note = 112 delta HNH TadA polypeptide sequence
MDKKYSIGLAIGTNSVGWAVITDEYKVPSKKFKVLGNTDRHSIKKNLIGALLFDSGETAEATRLKRTARRRYTRRKNRICYLQEIFSNEMAKVDDSFFHRLEESFLVEEDKKHERHPIFGNIVDEVAYHEKYPTIYHLRKKLVDSTDKADLRLIYLALAHMIKFRGHFLIEGDLNPDNSDVDKLFIQLVQTYNQLFEENPINASGVDAKAILSARLSKSRRLENLIAQLPGEKKNGLFGNLIALSLGLTPNFKSNFDLAEDAKLQLSKDTYDDDLDNLLAQIGDQYADLFLAAKNLSDAILLSDILRVNTEITKAPLSASMIKRYDEHHQDLTLLKALVRQQLPEKYKEIFFDQSKNGYAGYIDGGASQEEFYKFIKPILEKMDGTEELLVKLNREDLLRKQRTFDNGSIPHQIHLGELHAILRRQEDFYPFLKDNREKIEKILTFRIPYYVGPLARGNSRFAWMTRKSEETITPWNFEEVVDKGASAQSFIERMTNFDKNLPNEKVLPKHSLLYEYFTVYNELTKVKYVTEGMRKPAFLSGEQKKAIVDLLFKTNRKVTVKQLKEDYFKKIECFDSVEISGVEDRFNASLGTYHDLLKIIKDKDFLDNEENEDILEDIVLTLTLFEDREMIEERLKTYAHLFDDKVMKQLKRRRYTGWGRLSRKLINGIRDKQSGKTILDFLKSDGFANRNFMQLIHDDSLTFKEDIQKAQVSGQGDSLHEHIANLAGSPAIKKGILQTVKVVDELVKVMGRHKPENIVIEMARENQTTQKGQKNSRERMKRIEEGIKELGSEVEFSHEYWMRHALTLAKRARDEREVPVGAVLVLNNRVIGEGWNRAIGLHDPTAHAEIMALRQGGLVMQNYRLIDATLYVTFEPCVMCAGAMIHSRIGRVVFGVRNAKTGAAGSLMDVLHYPGMNHRVEITEGILADECAALLCYFFRMPRQVFNAQKKAQSSTDGGLSELDKAGFIKRQLVETRQITKHVAQILDSRMNTKYDENDKLIREVKVITLKSKLVSDFRKDFQFYKVREINNYHHAHDAYLNAVVGTALIKKYPKLESEFVYGDYKVYDVRKMIAKSEQEIGKATAKYFFYSNIMNFFKTEITLANGEIRKRPLIETNGETGEIVWDKGRDFATVRKVLSMPQVNIVKKTEVQTGGFSKESILPKRNSDKLIARKKDWDPKKYGGFDSPTVAYSVLVVAKVEKGKSKKLKSVKELLGITIMERSSFEKNPIDFLEAKGYKEVKKDLIIKLPKYSLFELENGRKRMLASAGELQKGNELALPSKYVNFLYLASHYEKLKGSPEDNEQKQLFVEQHKHYLDEIIEQISEFSKRVILADANLDKVLSAYNKHRDKPIREQAENIIHLFTLTNLGAPAAFKYFDTTIDRKRYTSTKEVLDATLIHQSITGLYETRIDLSQLGGD

SEQ ID NO: 284 - protein, 1552 aa, synthetic construct
  REGION 1..1552: note = 113 N-term single TadA helixtrunc 165-end polypeptide sequence
MSEVEFSHEYWMRHALTLAKRARDEREVPVGAVLVLNNRVIGEGWNRAIGLHDPTAHAEIMALRQGGLVMQNYRLIDATLYVTFEPCVMCAGAMIHSRIGRVVFGVRNAKTGAAGSLMDVLHYPGMNHRVEITEGILADECAALLCYFFRMPRSGGSSGGSSGSETPGTSESATPESSGGSSGGSDKKYSIGLAIGTNSVGWAVITDEYKVPSKKFKVLGNTDRHSIKKNLIGALLFDSGETAEATRLKRTARRRYTRRKNRICYLQEIFSNEMAKVDDSFFHRLEESFLVEEDKKHERHPIFGNIVDEVAYHEKYPTIYHLRKKLVDSTDKADLRLIYLALAHMIKFRGHFLIEGDLNPDNSDVDKLFIQLVQTYNQLFEENPINASGVDAKAILSARLSKSRRLENLIAQLPGEKKNGLFGNLIALSLGLTPNFKSNFDLAEDAKLQLSKDTYDDDLDNLLAQIGDQYADLFLAAKNLSDAILLSDILRVNTEITKAPLSASMIKRYDEHHQDLTLLKALVRQQLPEKYKEIFFDQSKNGYAGYIDGGASQEEFYKFIKPILEKMDGTEELLVKLNREDLLRKQRTFDNGSIPHQIHLGELHAILRRQEDFYPFLKDNREKIEKILTFRIPYYVGPLARGNSRFAWMTRKSEETITPWNFEEVVDKGASAQSFIERMTNFDKNLPNEKVLPKHSLLYEYFTVYNELTKVKYVTEGMRKPAFLSGEQKKAIVDLLFKTNRKVTVKQLKEDYFKKIECFDSVEISGVEDRFNASLGTYHDLLKIIKDKDFLDNEENEDILEDIVLTLTLFEDREMIEERLKTYAHLFDDKVMKQLKRRRYTGWGRLSRKLINGIRDKQSGKTILDFLKSDGFANRNFMQLIHDDSLTFKEDIQKAQVSGQGDSLHEHIANLAGSPAIKKGILQTVKVVDELVKVMGRHKPENIVIEMARENQTTQKGQKNSRERMKRIEEGIKELGSQILKEHPVENTQLQNEKLYLYYLQNGRDMYVDQELDINRLSDYDVDHIVPQSFLKDDSIDNKVLTRSDKNRGKSDNVPSEEVVKKMKNYWRQLLNAKLITQRKFDNLTKAERGGLSELDKAGFIKRQLVETRQITKHVAQILDSRMNTKYDENDKLIREVKVITLKSKLVSDFRKDFQFYKVREINNYHHAHDAYLNAVVGTALIKKYPKLESEFVYGDYKVYDVRKMIAKSEQEIGKATAKYFFYSNIMNFFKTEITLANGEIRKRPLIETNGETGEIVWDKGRDFATVRKVLSMPQVNIVKKTEVQTGGFSKESILPKRNSDKLIARKKDWDPKKYGGFDSPTVAYSVLVVAKVEKGKSKKLKSVKELLGITIMERSSFEKNPIDFLEAKGYKEVKKDLIIKLPKYSLFELENGRKRMLASAGELQKGNELALPSKYVNFLYLASHYEKLKGSPEDNEQKQLFVEQHKHYLDEIIEQISEFSKRVILADANLDKVLSAYNKHRDKPIREQAENIIHLFTLTNLGAPAAFKYFDTTIDRKRYTSTKEVLDATLIHQSITGLYETRIDLSQLGGD

SEQ ID NO: 285 - protein, 1545 aa, synthetic construct
  REGION 1..1545: note = 114 N-term single TadA helixtrunc 165-end delta 59-65 polypeptide sequence
MSEVEFSHEYWMRHALTLAKRARDEREVPVGAVLVLNNRVIGEGWNRTAHAEIMALRQGGLVMQNYRLIDATLYVTFEPCVMCAGAMIHSRIGRVVFGVRNAKTGAAGSLMDVLHYPGMNHRVEITEGILADECAALLCYFFRMPRSGGSSGGSSGSETPGTSESATPESSGGSSGGSDKKYSIGLAIGTNSVGWAVITDEYKVPSKKFKVLGNTDRHSIKKNLIGALLFDSGETAEATRLKRTARRRYTRRKNRICYLQEIFSNEMAKVDDSFFHRLEESFLVEEDKKHERHPIFGNIVDEVAYHEKYPTIYHLRKKLVDSTDKADLRLIYLALAHMIKFRGHFLIEGDLNPDNSDVDKLFIQLVQTYNQLFEENPINASGVDAKAILSARLSKSRRLENLIAQLPGEKKNGLFGNLIALSLGLTPNFKSNFDLAEDAKLQLSKDTYDDDLDNLLAQIGDQYADLFLAAKNLSDAILLSDILRVNTEITKAPLSASMIKRYDEHHQDLTLLKALVRQQLPEKYKEIFFDQSKNGYAGYIDGGASQEEFYKFIKPILEKMDGTEELLVKLNREDLLRKQRTFDNGSIPHQIHLGELHAILRRQEDFYPFLKDNREKIEKILTFRIPYYVGPLARGNSRFAWMTRKSEETITPWNFEEVVDKGASAQSFIERMTNFDKNLPNEKVLPKHSLLYEYFTVYNELTKVKYVTEGMRKPAFLSGEQKKAIVDLLFKTNRKVTVKQLKEDYFKKIECFDSVEISGVEDRFNASLGTYHDLLKIIKDKDFLDNEENEDILEDIVLTLTLFEDREMIEERLKTYAHLFDDKVMKQLKRRRYTGWGRLSRKLINGIRDKQSGKTILDFLKSDGFANRNFMQLIHDDSLTFKEDIQKAQVSGQGDSLHEHIANLAGSPAIKKGILQTVKVVDELVKVMGRHKPENIVIEMARENQTTQKGQKNSRERMKRIEEGIKELGSQILKEHPVENTQLQNEKLYLYYLQNGRDMYVDQELDINRLSDYDVDHIVPQSFLKDDSIDNKVLTRSDKNRGKSDNVPSEEVVKKMKNYWRQLLNAKLITQRKFDNLTKAERGGLSELDKAGFIKRQLVETRQITKHVAQILDSRMNTKYDENDKLIREVKVITLKSKLVSDFRKDFQFYKVREINNYHHAHDAYLNAVVGTALIKKYPKLESEFVYGDYKVYDVRKMIAKSEQEIGKATAKYFFYSNIMNFFKTEITLANGEIRKRPLIETNGETGEIVWDKGRDFATVRKVLSMPQVNIVKKTEVQTGGFSKESILPKRNSDKLIARKKDWDPKKYGGFDSPTVAYSVLVVAKVEKGKSKKLKSVKELLGITIMERSSFEKNPIDFLEAKGYKEVKKDLIIKLPKYSLFELENGRKRMLASAGELQKGNELALPSKYVNFLYLASHYEKLKGSPEDNEQKQLFVEQHKHYLDEIIEQISEFSKRVILADANLDKVLSAYNKHRDKPIREQAENIIHLFTLTNLGAPAAFKYFDTTIDRKRYTSTKEVLDATLIHQSITGLYETRIDLSQLGGD

SEQ ID NO: 286 - protein, 1541 aa, synthetic construct
  REGION 1..1541: note = 115.1 Cas9 TadAins 1004 polypeptide sequence
MDKKYSIGLAIGTNSVGWAVITDEYKVPSKKFKVLGNTDRHSIKKNLIGALLFDSGETAEATRLKRTARRRYTRRKNRICYLQEIFSNEMAKVDDSFFHRLEESFLVEEDKKHERHPIFGNIVDEVAYHEKYPTIYHLRKKLVDSTDKADLRLIYLALAHMIKFRGHFLIEGDLNPDNSDVDKLFIQLVQTYNQLFEENPINASGVDAKAILSARLSKSRRLENLIAQLPGEKKNGLFGNLIALSLGLTPNFKSNFDLAEDAKLQLSKDTYDDDLDNLLAQIGDQYADLFLAAKNLSDAILLSDILRVNTEITKAPLSASMIKRYDEHHQDLTLLKALVRQQLPEKYKEIFFDQSKNGYAGYIDGGASQEEFYKFIKPILEKMDGTEELLVKLNREDLLRKQRTFDNGSIPHQIHLGELHAILRRQEDFYPFLKDNREKIEKILTFRIPYYVGPLARGNSRFAWMTRKSEETITPWNFEEVVDKGASAQSFIERMTNFDKNLPNEKVLPKHSLLYEYFTVYNELTKVKYVTEGMRKPAFLSGEQKKAIVDLLFKTNRKVTVKQLKEDYFKKIECFDSVEISGVEDRFNASLGTYHDLLKIIKDKDFLDNEENEDILEDIVLTLTLFEDREMIEERLKTYAHLFDDKVMKQLKRRRYTGWGRLSRKLINGIRDKQSGKTILDFLKSDGFANRNFMQLIHDDSLTFKEDIQKAQVSGQGDSLHEHIANLAGSPAIKKGILQTVKVVDELVKVMGRHKPENIVIEMARENQTTQKGQKNSRERMKRIEEGIKELGSQILKEHPVENTQLQNEKLYLYYLQNGRDMYVDQELDINRLSDYDVDHIVPQSFLKDDSIDNKVLTRSDKNRGKSDNVPSEEVVKKMKNYWRQLLNAKLITQRKFDNLTKAERGGLSELDKAGFIKRQLVETRQITKHVAQILDSRMNTKYDENDKLIREVKVITLKSKLVSDFRKDFQFYKVREINNYHHAHDAYLNAVVGTALIKKYPKGSSGSETPGTSESATPESSGSEVEFSHEYWMRHALTLAKRARDEREVPVGAVLVLNNRVIGEGWNRAIGLHDPTAHAEIMALRQGGLVMQNYRLIDATLYVTFEPCVMCAGAMIHSRIGRVVFGVRNAKTGAAGSLMDVLHYPGMNHRVEITEGILADECAALLCYFFRMPRQLESEFVYGDYKVYDVRKMIAKSEQEIGKATAKYFFYSNIMNFFKTEITLANGEIRKRPLIETNGETGEIVWDKGRDFATVRKVLSMPQVNIVKKTEVQTGGFSKESILPKRNSDKLIARKKDWDPKKYGGFDSPTVAYSVLVVAKVEKGKSKKLKSVKELLGITIMERSSFEKNPIDFLEAKGYKEVKKDLIIKLPKYSLFELENGRKRMLASAGELQKGNELALPSKYVNFLYLASHYEKLKGSPEDNEQKQLFVEQHKHYLDEIIEQISEFSKRVILADANLDKVLSAYNKHRDKPIREQAENIIHLFTLTNLGAPAAFKYFDTTIDRKRYTSTKEVLDATLIHQSITGLYETRIDLSQLGGD

SEQ ID NO: 287 - protein, 1541 aa, synthetic construct
  REGION 1..1541: note = 115.2 Cas9 TadAins 1005 polypeptide sequence
MDKKYSIGLAIGTNSVGWAVITDEYKVPSKKFKVLGNTDRHSIKKNLIGALLFDSGETAEATRLKRTARRRYTRRKNRICYLQEIFSNEMAKVDDSFFHRLEESFLVEEDKKHERHPIFGNIVDEVAYHEKYPTIYHLRKKLVDSTDKADLRLIYLALAHMIKFRGHFLIEGDLNPDNSDVDKLFIQLVQTYNQLFEENPINASGVDAKAILSARLSKSRRLENLIAQLPGEKKNGLFGNLIALSLGLTPNFKSNFDLAEDAKLQLSKDTYDDDLDNLLAQIGDQYADLFLAAKNLSDAILLSDILRVNTEITKAPLSASMIKRYDEHHQDLTLLKALVRQQLPEKYKEIFFDQSKNGYAGYIDGGASQEEFYKFIKPILEKMDGTEELLVKLNREDLLRKQRTFDNGSIPHQIHLGELHAILRRQEDFYPFLKDNREKIEKILTFRIPYYVGPLARGNSRFAWMTRKSEETITPWNFEEVVDKGASAQSFIERMTNFDKNLPNEKVLPKHSLLYEYFTVYNELTKVKYVTEGMRKPAFLSGEQKKAIVDLLFKTNRKVTVKQLKEDYFKKIECFDSVEISGVEDRFNASLGTYHDLLKIIKDKDFLDNEENEDILEDIVLTLTLFEDREMIEERLKTYAHLFDDKVMKQLKRRRYTGWGRLSRKLINGIRDKQSGKTILDFLKSDGFANRNFMQLIHDDSLTFKEDIQKAQVSGQGDSLHEHIANLAGSPAIKKGILQTVKVVDELVKVMGRHKPENIVIEMARENQTTQKGQKNSRERMKRIEEGIKELGSQILKEHPVENTQLQNEKLYLYYLQNGRDMYVDQELDINRLSDYDVDHIVPQSFLKDDSIDNKVLTRSDKNRGKSDNVPSEEVVKKMKNYWRQLLNAKLITQRKFDNLTKAERGGLSELDKAGFIKRQLVETRQITKHVAQILDSRMNTKYDENDKLIREVKVITLKSKLVSDFRKDFQFYKVREINNYHHAHDAYLNAVVGTALIKKYPKLGSSGSETPGTSESATPESSGSEVEFSHEYWMRHALTLAKRARDEREVPVGAVLVLNNRVIGEGWNRAIGLHDPTAHAEIMALRQGGLVMQNYRLIDATLYVTFEPCVMCAGAMIHSRIGRVVFGVRNAKTGAAGSLMDVLHYPGMNHRVEITEGILADECAALLCYFFRMPRQESEFVYGDYKVYDVRKMIAKSEQEIGKATAKYFFYSNIMNFFKTEITLANGEIRKRPLIETNGETGEIVWDKGRDFATVRKVLSMPQVNIVKKTEVQTGGFSKESILPKRNSDKLIARKKDWDPKKYGGFDSPTVAYSVLVVAKVEKGKSKKLKSVKELLGITIMERSSFEKNPIDFLEAKGYKEVKKDLIIKLPKYSLFELENGRKRMLASAGELQKGNELALPSKYVNFLYLASHYEKLKGSPEDNEQKQLFVEQHKHYLDEIIEQISEFSKRVILADANLDKVLSAYNKHRDKPIREQAENIIHLFTLTNLGAPAAFKYFDTTIDRKRYTSTKEVLDATLIHQSITGLYETRIDLSQLGGD

SEQ ID NO: 288 - protein, 1541 aa, synthetic construct
  REGION 1..1541: note = 115.3 Cas9 TadAins 1006 polypeptide sequence
MDKKYSIGLAIGTNSVGWAVITDEYKVPSKKFKVLGNTDRHSIKKNLIGALLFDSGETAEATRLKRTARRRYTRRKNRICYLQEIFSNEMAKVDDSFFHRLEESFLVEEDKKHERHPIFGNIVDEVAYHEKYPTIYHLRKKLVDSTDKADLRLIYLALAHMIKFRGHFLIEGDLNPDNSDVDKLFIQLVQTYNQLFEENPINASGVDAKAILSARLSKSRRLENLIAQLPGEKKNGLFGNLIALSLGLTPNFKSNFDLAEDAKLQLSKDTYDDDLDNLLAQIGDQYADLFLAAKNLSDAILLSDILRVNTEITKAPLSASMIKRYDEHHQDLTLLKALVRQQLPEKYKEIFFDQSKNGYAGYIDGGASQEEFYKFIKPILEKMDGTEELLVKLNREDLLRKQRTFDNGSIPHQIHLGELHAILRRQEDFYPFLKDNREKIEKILTFRIPYYVGPLARGNSRFAWMTRKSEETITPWNFEEVVDKGASAQSFIERMTNFDKNLPNEKVLPKHSLLYEYFTVYNELTKVKYVTEGMRKPAFLSGEQKKAIVDLLFKTNRKVTVKQLKEDYFKKIECFDSVEISGVEDRFNASLGTYHDLLKIIKDKDFLDNEENEDILEDIVLTLTLFEDREMIEERLKTYAHLFDDKVMKQLKRRRYTGWGRLSRKLINGIRDKQSGKTILDFLKSDGFANRNFMQLIHDDSLTFKEDIQKAQVSGQGDSLHEHIANLAGSPAIKKGILQTVKVVDELVKVMGRHKPENIVIEMARENQTTQKGQKNSRERMKRIEEGIKELGSQILKEHPVENTQLQNEKLYLYYLQNGRDMYVDQELDINRLSDYDVDHIVPQSFLKDDSIDNKVLTRSDKNRGKSDNVPSEEVVKKMKNYWRQLLNAKLITQRKFDNLTKAERGGLSELDKAGFIKRQLVETRQITKHVAQILDSRMNTKYDENDKLIREVKVITLKSKLVSDFRKDFQFYKVREINNYHHAHDAYLNAVVGTALIKKYPKLEGSSGSETPGTSESATPESSGSEVEFSHEYWMRHALTLAKRARDEREVPVGAVLVLNNRVIGEGWNRAIGLHDPTAHAEIMALRQGGLVMQNYRLIDATLYVTFEPCVMCAGAMIHSRIGRVVFGVRNAKTGAAGSLMDVLHYPGMNHRVEITEGILADECAALLCYFFRMPRQSEFVYGDYKVYDVRKMIAKSEQEIGKATAKYFFYSNIMNFFKTEITLANGEIRKRPLIETNGETGEIVWDKGRDFATVRKVLSMPQVNIVKKTEVQTGGFSKESILPKRNSDKLIARKKDWDPKKYGGFDSPTVAYSVLVVAKVEKGKSKKLKSVKELLGITIMERSSFEKNPIDFLEAKGYKEVKKDLIIKLPKYSLFELENGRKRMLASAGELQKGNELALPSKYVNFLYLASHYEKLKGSPEDNEQKQLFVEQHKHYLDEIIEQISEFSKRVILADANLDKVLSAYNKHRDKPIREQAENIIHLFTLTNLGAPAAFKYFDTTIDRKRYTSTKEVLDATLIHQSITGLYETRIDLSQLGGD

SEQ ID NO: 289 - protein, 1541 aa, synthetic construct
  REGION 1..1541: note = 115.4 Cas9 TadAins 1007 polypeptide sequence
MDKKYSIGLAIGTNSVGWAVITDEYKVPSKKFKVLGNTDRHSIKKNLIGALLFDSGETAEATRLKRTARRRYTRRKNRICYLQEIFSNEMAKVDDSFFHRLEESFLVEEDKKHERHPIFGNIVDEVAYHEKYPTIYHLRKKLVDSTDKADLRLIYLALAHMIKFRGHFLIEGDLNPDNSDVDKLFIQLVQTYNQLFEENPINASGVDAKAILSARLSKSRRLENLIAQLPGEKKNGLFGNLIALSLGLTPNFKSNFDLAEDAKLQLSKDTYDDDLDNLLAQIGDQYADLFLAAKNLSDAILLSDILRVNTEITKAPLSASMIKRYDEHHQDLTLLKALVRQQLPEKYKEIFFDQSKNGYAGYIDGGASQEEFYKFIKPILEKMDGTEELLVKLNREDLLRKQRTFDNGSIPHQIHLGELHAILRRQEDFYPFLKDNREKIEKILTFRIPYYVGPLARGNSRFAWMTRKSEETITPWNFEEVVDKGASAQSFIERMTNFDKNLPNEKVLPKHSLLYEYFTVYNELTKVKYVTEGMRKPAFLSGEQKKAIVDLLFKTNRKVTVKQLKEDYFKKIECFDSVEISGVEDRFNASLGTYHDLLKIIKDKDFLDNEENEDILEDIVLTLTLFEDREMIEERLKTYAHLFDDKVMKQLKRRRYTGWGRLSRKLINGIRDKQSGKTILDFLKSDGFANRNFMQLIHDDSLTFKEDIQKAQVSGQGDSLHEHIANLAGSPAIKKGILQTVKVVDELVKVMGRHKPENIVIEMARENQTTQKGQKNSRERMKRIEEGIKELGSQILKEHPVENTQLQNEKLYLYYLQNGRDMYVDQELDINRLSDYDVDHIVPQSFLKDDSIDNKVLTRSDKNRGKSDNVPSEEVVKKMKNYWRQLLNAKLITQRKFDNLTKAERGGLSELDKAGFIKRQLVETRQITKHVAQILDSRMNTKYDENDKLIREVKVITLKSKLVSDFRKDFQFYKVREINNYHHAHDAYLNAVVGTALIKKYPKLESGSSGSETPGTSESATPESSGSEVEFSHEYWMRHALTLAKRARDEREVPVGAVLVLNNRVIGEGWNRAIGLHDPTAHAEIMALRQGGLVMQNYRLIDATLYVTFEPCVMCAGAMIHSRIGRVVFGVRNAKTGAAGSLMDVLHYPGMNHRVEITEGILADECAALLCYFFRMPRQEFVYGDYKVYDVRKMIAKSEQEIGKATAKYFFYSNIMNFFKTEITLANGEIRKRPLIETNGETGEIVWDKGRDFATVRKVLSMPQVNIVKKTEVQTGGFSKESILPKRNSDKLIARKKDWDPKKYGGFDSPTVAYSVLVVAKVEKGKSKKLKSVKELLGITIMERSSFEKNPIDFLEAKGYKEVKKDLIIKLPKYSLFELENGRKRMLASAGELQKGNELALPSKYVNFLYLASHYEKLKGSPEDNEQKQLFVEQHKHYLDEIIEQISEFSKRVILADANLDKVLSAYNKHRDKPIREQAENIIHLFTLTNLGAPAAFKYFDTTIDRKRYTSTKEVLDATLIHQSITGLYETRIDLSQLGGD

SEQ ID NO: 290 - protein, 1541 aa, synthetic construct
  REGION 1..1541: note = 116.1 Cas9 TadAins C-term truncate 792 polypeptide sequence
MDKKYSIGLAIGTNSVGWAVITDEYKVPSKKFKVLGNTDRHSIKKNLIGALLFDSGETAEATRLKRTARRRYTRRKNRICYLQEIFSNEMAKVDDSFFHRLEESFLVEEDKKHERHPIFGNIVDEVAYHEKYPTIYHLRKKLVDSTDKADLRLIYLALAHMIKFRGHFLIEGDLNPDNSDVDKLFIQLVQTYNQLFEENPINASGVDAKAILSARLSKSRRLENLIAQLPGEKKNGLFGNLIALSLGLTPNFKSNFDLAEDAKLQLSKDTYDDDLDNLLAQIGDQYADLFLAAKNLSDAILLSDILRVNTEITKAPLSASMIKRYDEHHQDLTLLKALVRQQLPEKYKEIFFDQSKNGYAGYIDGGASQEEFYKFIKPILEKMDGTEELLVKLNREDLLRKQRTFDNGSIPHQIHLGELHAILRRQEDFYPFLKDNREKIEKILTFRIPYYVGPLARGNSRFAWMTRKSEETITPWNFEEVVDKGASAQSFIERMTNFDKNLPNEKVLPKHSLLYEYFTVYNELTKVKYVTEGMRKPAFLSGEQKKAIVDLLFKTNRKVTVKQLKEDYFKKIECFDSVEISGVEDRFNASLGTYHDLLKIIKDKDFLDNEENEDILEDIVLTLTLFEDREMIEERLKTYAHLFDDKVMKQLKRRRYTGWGRLSRKLINGIRDKQSGKTILDFLKSDGFANRNFMQLIHDDSLTFKEDIQKAQVSGQGDSLHEHIANLAGSPAIKKGILQTVKVVDELVKVMGRHKPENIVIEMARENQTTQKGQKNSRERMKRIEEGIKELGGSSGSETPGTSESATPESSGSEVEFSHEYWMRHALTLAKRARDEREVPVGAVLVLNNRVIGEGWNRAIGLHDPTAHAEIMALRQGGLVMQNYRLIDATLYVTFEPCVMCAGAMIHSRIGRVVFGVRNAKTGAAGSLMDVLHYPGMNHRVEITEGILADECAALLCYFFRMPRQSQILKEHPVENTQLQNEKLYLYYLQNGRDMYVDQELDINRLSDYDVDHIVPQSFLKDDSIDNKVLTRSDKNRGKSDNVPSEEVVKKMKNYWRQLLNAKLITQRKFDNLTKAERGGLSELDKAGFIKRQLVETRQITKHVAQILDSRMNTKYDENDKLIREVKVITLKSKLVSDFRKDFQFYKVREINNYHHAHDAYLNAVVGTALIKKYPKLESEFVYGDYKVYDVRKMIAKSEQEIGKATAKYFFYSNIMNFFKTEITLANGEIRKRPLIETNGETGEIVWDKGRDFATVRKVLSMPQVNIVKKTEVQTGGFSKESILPKRNSDKLIARKKDWDPKKYGGFDSPTVAYSVLVVAKVEKGKSKKLKSVKELLGITIMERSSFEKNPIDFLEAKGYKEVKKDLIIKLPKYSLFELENGRKRMLASAGELQKGNELALPSKYVNFLYLASHYEKLKGSPEDNEQKQLFVEQHKHYLDEIIEQISEFSKRVILADANLDKVLSAYNKHRDKPIREQAENIIHLFTLTNLGAPAAFKYFDTTIDRKRYTSTKEVLDATLIHQSITGLYETRIDLSQLGGD

SEQ ID NO: 291 - protein, 1541 aa, synthetic construct
  REGION 1..1541: note = 116.2 Cas9 TadAins C-term truncate 791 polypeptide sequence
MDKKYSIGLAIGTNSVGWAVITDEYKVPSKKFKVLGNTDRHSIKKNLIGALLFDSGETAEATRLKRTARRRYTRRKNRICYLQEIFSNEMAKVDDSFFHRLEESFLVEEDKKHERHPIFGNIVDEVAYHEKYPTIYHLRKKLVDSTDKADLRLIYLALAHMIKFRGHFLIEGDLNPDNSDVDKLFIQLVQTYNQLFEENPINASGVDAKAILSARLSKSRRLENLIAQLPGEKKNGLFGNLIALSLGLTPNFKSNFDLAEDAKLQLSKDTYDDDLDNLLAQIGDQYADLFLAAKNLSDAILLSDILRVNTEITKAPLSASMIKRYDEHHQDLTLLKALVRQQLPEKYKEIFFDQSKNGYAGYIDGGASQEEFYKFIKPILEKMDGTEELLVKLNREDLLRKQRTFDNGSIPHQIHLGELHAILRRQEDFYPFLKDNREKIEKILTFRIPYYVGPLARGNSRFAWMTRKSEETITPWNFEEVVDKGASAQSFIERMTNFDKNLPNEKVLPKHSLLYEYFTVYNELTKVKYVTEGMRKPAFLSGEQKKAIVDLLFKTNRKVTVKQLKEDYFKKIECFDSVEISGVEDRFNASLGTYHDLLKIIKDKDFLDNEENEDILEDIVLTLTLFEDREMIEERLKTYAHLFDDKVMKQLKRRRYTGWGRLSRKLINGIRDKQSGKTILDFLKSDGFANRNFMQLIHDDSLTFKEDIQKAQVSGQGDSLHEHIANLAGSPAIKKGILQTVKVVDELVKVMGRHKPENIVIEMARENQTTQKGQKNSRERMKRIEEGIKELGSSGSETPGTSESATPESSGSEVEFSHEYWMRHALTLAKRARDEREVPVGAVLVLNNRVIGEGWNRAIGLHDPTAHAEIMALRQGGLVMQNYRLIDATLYVTFEPCVMCAGAMIHSRIGRVVFGVRNAKTGAAGSLMDVLHYPGMNHRVEITEGILADECAALLCYFFRMPRQGSQILKEHPVENTQLQNEKLYLYYLQNGRDMYVDQELDINRLSDYDVDHIVPQSFLKDDSIDNKVLTRSDKNRGKSDNVPSEEVVKKMKNYWRQLLNAKLITQRKFDNLTKAERGGLSELDKAGFIKRQLVETRQITKHVAQILDSRMNTKYDENDKLIREVKVITLKSKLVSDFRKDFQFYKVREINNYHHAHDAYLNAVVGTALIKKYPKLESEFVYGDYKVYDVRKMIAKSEQEIGKATAKYFFYSNIMNFFKTEITLANGEIRKRPLIETNGETGEIVWDKGRDFATVRKVLSMPQVNIVKKTEVQTGGFSKESILPKRNSDKLIARKKDWDPKKYGGFDSPTVAYSVLVVAKVEKGKSKKLKSVKELLGITIMERSSFEKNPIDFLEAKGYKEVKKDLIIKLPKYSLFELENGRKRMLASAGELQKGNELALPSKYVNFLYLASHYEKLKGSPEDNEQKQLFVEQHKHYLDEIIEQISEFSKRVILADANLDKVLSAYNKHRDKPIREQAENIIHLFTLTNLGAPAAFKYFDTTIDRKRYTSTKEVLDATLIHQSITGLYETRIDLSQLGGD

SEQ ID NO: 292 - protein, 1541 aa, synthetic construct
  REGION 1..1541: note = 116.3 Cas9 TadAins C-term truncate 790 polypeptide sequence
MDKKYSIGLAIGTNSVGWAVITDEYKVPSKKFKVLGNTDRHSIKKNLIGALLFDSGETAEATRLKRTARRRYTRRKNRICYLQEIFSNEMAKVDDSFFHRLEESFLVEEDKKHERHPIFGNIVDEVAYHEKYPTIYHLRKKLVDSTDKADLRLIYLALAHMIKFRGHFLIEGDLNPDNSDVDKLFIQLVQTYNQLFEENPINASGVDAKAILSARLSKSRRLENLIAQLPGEKKNGLFGNLIALSLGLTPNFKSNFDLAEDAKLQLSKDTYDDDLDNLLAQIGDQYADLFLAAKNLSDAILLSDILRVNTEITKAPLSASMIKRYDEHHQDLTLLKALVRQQLPEKYKEIFFDQSKNGYAGYIDGGASQEEFYKFIKPILEKMDGTEELLVKLNREDLLRKQRTFDNGSIPHQIHLGELHAILRRQEDFYPFLKDNREKIEKILTFRIPYYVGPLARGNSRFAWMTRKSEETITPWNFEEVVDKGASAQSFIERMTNFDKNLPNEKVLPKHSLLYEYFTVYNELTKVKYVTEGMRKPAFLSGEQKKAIVDLLFKTNRKVTVKQLKEDYFKKIECFDSVEISGVEDRFNASLGTYHDLLKIIKDKDFLDNEENEDILEDIVLTLTLFEDREMIEERLKTYAHLFDDKVMKQLKRRRYTGWGRLSRKLINGIRDKQSGKTILDFLKSDGFANRNFMQLIHDDSLTFKEDIQKAQVSGQGDSLHEHIANLAGSPAIKKGILQTVKVVDELVKVMGRHKPENIVIEMARENQTTQKGQKNSRERMKRIEEGIKEGSSGSETPGTSESATPESSGSEVEFSHEYWMRHALTLAKRARDEREVPVGAVLVLNNRVIGEGWNRAIGLHDPTAHAEIMALRQGGLVMQNYRLIDATLYVTFEPCVMCAGAMIHSRIGRVVFGVRNAKTGAAGSLMDVLHYPGMNHRVEITEGILADECAALLCYFFRMPRQLGSQILKEHPVENTQLQNEKLYLYYLQNGRDMYVDQELDINRLSDYDVDHIVPQSFLKDDSIDNKVLTRSDKNRGKSDNVPSEEVVKKMKNYWRQLLNAKLITQRKFDNLTKAERGGLSELDKAGFIKRQLVETRQITKHVAQILDSRMNTKYDENDKLIREVKVITLKSKLVSDFRKDFQFYKVREINNYHHAHDAYLNAVVGTALIKKYPKLESEFVYGDYKVYDVRKMIAKSEQEIGKATAKYFFYSNIMNFFKTEITLANGEIRKRPLIETNGETGEIVWDKGRDFATVRKVLSMPQVNIVKKTEVQTGGFSKESILPKRNSDKLIARKKDWDPKKYGGFDSPTVAYSVLVVAKVEKGKSKKLKSVKELLGITIMERSSFEKNPIDFLEAKGYKEVKKDLIIKLPKYSLFELENGRKRMLASAGELQKGNELALPSKYVNFLYLASHYEKLKGSPEDNEQKQLFVEQHKHYLDEIIEQISEFSKRVILADANLDKVLSAYNKHRDKPIREQAENIIHLFTLTNLGAPAAFKYFDTTIDRKRYTSTKEVLDATLIHQSITGLYETRIDLSQLGGD

SEQ ID NO: 293 - protein, 1484 aa, synthetic construct
  REGION 1..1484: note = 117 Cas9 delta 1017-1069 polypeptide sequence
MDKKYSIGLAIGTNSVGWAVITDEYKVPSKKFKVLGNTDRHSIKKNLIGALLFDSGETAEATRLKRTARRRYTRRKNRICYLQEIFSNEMAKVDDSFFHRLEESFLVEEDKKHERHPIFGNIVDEVAYHEKYPTIYHLRKKLVDSTDKADLRLIYLALAHMIKFRGHFLIEGDLNPDNSDVDKLFIQLVQTYNQLFEENPINASGVDAKAILSARLSKSRRLENLIAQLPGEKKNGLFGNLIALSLGLTPNFKSNFDLAEDAKLQLSKDTYDDDLDNLLAQIGDQYADLFLAAKNLSDAILLSDILRVNTEITKAPLSASMIKRYDEHHQDLTLLKALVRQQLPEKYKEIFFDQSKNGYAGYIDGGASQEEFYKFIKPILEKMDGTEELLVKLNREDLLRKQRTFDNGSIPHQIHLGELHAILRRQEDFYPFLKDNREKIEKILTFRIPYYVGPLARGNSRFAWMTRKSEETITPWNFEEVVDKGASAQSFIERMTNFDKNLPNEKVLPKHSLLYEYFTVYNELTKVKYVTEGMRKPAFLSGEQKKAIVDLLFKTNRKVTVKQLKEDYFKKIECFDSVEISGVEDRFNASLGTYHDLLKIIKDKDFLDNEENEDILEDIVLTLTLFEDREMIEERLKTYAHLFDDKVMKQLKRRRYTGWGRLSRKLINGIRDKQSGKTILDFLKSDGFANRNFMQLIHDDSLTFKEDIQKAQVSGQGDSLHEHIANLAGSPAIKKGILQTVKVVDELVKVMGRHKPENIVIEMARENQTTQKGQKNSRERMKRIEEGIKELGSQILKEHPVENTQLQNEKLYLYYLQNGRDMYVDQELDINRLSDYDVDHIVPQSFLKDDSIDNKVLTRSDKNRGKSDNVPSEEVVKKMKNYWRQLLNAKLITQRKFDNLTKAERGGLSELDKAGFIKRQLVETRQITKHVAQILDSRMNTKYDENDKLIREVKVITLKSKLVSDFRKDFQFYKVREINNYHHAHDAYLNAVVGTALIKKYPKLESEFVYGDYKVYSSGSEVEFSHEYWMRHALTLAKRARDEREVPVGAVLVLNNRVIGEGWNRAIGLHDPTAHAEIMALRQGGLVMQNYRLIDATLYVTFEPCVMCAGAMIHSRIGRVVFGVRNAKTGAAGSLMDVLHYPGMNHRVEITEGILADECAALLCYFFRMPRQVFNAQKKAQSSTDGEIVWDKGRDFATVRKVLSMPQVNIVKKTEVQTGGFSKESILPKRNSDKLIARKKDWDPKKYGGFDSPTVAYSVLVVAKVEKGKSKKLKSVKELLGITIMERSSFEKNPIDFLEAKGYKEVKKDLIIKLPKYSLFELENGRKRMLASAGELQKGNELALPSKYVNFLYLASHYEKLKGSPEDNEQKQLFVEQHKHYLDEIIEQISEFSKRVILADANLDKVLSAYNKHRDKPIREQAENIIHLFTLTNLGAPAAFKYFDTTIDRKRYTSTKEVLDATLIHQSITGLYETRIDLSQLGGD

SEQ ID NO: 294 - protein, 1554 aa, synthetic construct
  REGION 1..1554: note = 118 Cas9 TadA-CP116ins 1067 polypeptide sequence
MDKKYSIGLAIGTNSVGWAVITDEYKVPSKKFKVLGNTDRHSIKKNLIGALLFDSGETAEATRLKRTARRRYTRRKNRICYLQEIFSNEMAKVDDSFFHRLEESFLVEEDKKHERHPIFGNIVDEVAYHEKYPTIYHLRKKLVDSTDKADLRLIYLALAHMIKFRGHFLIEGDLNPDNSDVDKLFIQLVQTYNQLFEENPINASGVDAKAILSARLSKSRRLENLIAQLPGEKKNGLFGNLIALSLGLTPNFKSNFDLAEDAKLQLSKDTYDDDLDNLLAQIGDQYADLFLAAKNLSDAILLSDILRVNTEITKAPLSASMIKRYDEHHQDLTLLKALVRQQLPEKYKEIFFDQSKNGYAGYIDGGASQEEFYKFIKPILEKMDGTEELLVKLNREDLLRKQRTFDNGSIPHQIHLGELHAILRRQEDFYPFLKDNREKIEKILTFRIPYYVGPLARGNSRFAWMTRKSEETITPWNFEEVVDKGASAQSFIERMTNFDKNLPNEKVLPKHSLLYEYFTVYNELTKVKYVTEGMRKPAFLSGEQKKAIVDLLFKTNRKVTVKQLKEDYFKKIECFDSVEISGVEDRFNASLGTYHDLLKIIKDKDFLDNEENEDILEDIVLTLTLFEDREMIEERLKTYAHLFDDKVMKQLKRRRYTGWGRLSRKLINGIRDKQSGKTILDFLKSDGFANRNFMQLIHDDSLTFKEDIQKAQVSGQGDSLHEHIANLAGSPAIKKGILQTVKVVDELVKVMGRHKPENIVIEMARENQTTQKGQKNSRERMKRIEEGIKELGSQILKEHPVENTQLQNEKLYLYYLQNGRDMYVDQELDINRLSDYDVDHIVPQSFLKDDSIDNKVLTRSDKNRGKSDNVPSEEVVKKMKNYWRQLLNAKLITQRKFDNLTKAERGGLSELDKAGFIKRQLVETRQITKHVAQILDSRMNTKYDENDKLIREVKVITLKSKLVSDFRKDFQFYKVREINNYHHAHDAYLNAVVGTALIKKYPKLESEFVYGDYKVYDVRKMIAKSEQEIGKATAKYFFYSNIMNFFKTEITLANGEIRKRPLIETNMNHRVEITEGILADECAALLCYFFRMPRQVFNAQKKAQSSTDGSSGSETPGTSESATPESSGSEVEFSHEYWMRHALTLAKRARDEREVPVGAVLVLNNRVIGEGWNRAIGLHDPTAHAEIMALRQGGLVMQNYRLIDATLYVTFEPCVMCAGAMIHSRIGRVVFGVRNAKTGAAGSLMDVLHYPGGETGEIVWDKGRDFATVRKVLSMPQVNIVKKTEVQTGGFSKESILPKRNSDKLIARKKDWDPKKYGGFDSPTVAYSVLVVAKVEKGKSKKLKSVKELLGITIMERSSFEKNPIDFLEAKGYKEVKKDLIIKLPKYSLFELENGRKRMLASAGELQKGNELALPSKYVNFLYLASHYEKLKGSPEDNEQKQLFVEQHKHYLDEIIEQISEFSKRVILADANLDKVLSAYNKHRDKPIREQAENIIHLFTLTNLGAPAAFKYFDTTIDRKRYTSTKEVLDATLIHQSITGLYETRIDLSQLGGD

SEQ ID NO: 295 - protein, 1554 aa, synthetic construct
  REGION 1..1554: note = 119 Cas9 TadAins 701 polypeptide sequence
MDKKYSIGLAIGTNSVGWAVITDEYKVPSKKFKVLGNTDRHSIKKNLIGALLFDSGETAEATRLKRTARRRYTRRKNRICYLQEIFSNEMAKVDDSFFHRLEESFLVEEDKKHERHPIFGNIVDEVAYHEKYPTIYHLRKKLVDSTDKADLRLIYLALAHMIKFRGHFLIEGDLNPDNSDVDKLFIQLVQTYNQLFEENPINASGVDAKAILSARLSKSRRLENLIAQLPGEKKNGLFGNLIALSLGLTPNFKSNFDLAEDAKLQLSKDTYDDDLDNLLAQIGDQYADLFLAAKNLSDAILLSDILRVNTEITKAPLSASMIKRYDEHHQDLTLLKALVRQQLPEKYKEIFFDQSKNGYAGYIDGGASQEEFYKFIKPILEKMDGTEELLVKLNREDLLRKQRTFDNGSIPHQIHLGELHAILRRQEDFYPFLKDNREKIEKILTFRIPYYVGPLARGNSRFAWMTRKSEETITPWNFEEVVDKGASAQSFIERMTNFDKNLPNEKVLPKHSLLYEYFTVYNELTKVKYVTEGMRKPAFLSGEQKKAIVDLLFKTNRKVTVKQLKEDYFKKIECFDSVEISGVEDRFNASLGTYHDLLKIIKDKDFLDNEENEDILEDIVLTLTLFEDREMIEERLKTYAHLFDDKVMKQLKRRRYTGWGRLSRKLINGIRDKQSGKTILDFLKSDGFANRNFMQLIHDDSGSSGSETPGTSESATPESSGSEVEFSHEYWMRHALTLAKRARDEREVPVGAVLVLNNRVIGEGWNRAIGLHDPTAHAEIMALRQGGLVMQNYRLIDATLYVTFEPCVMCAGAMIHSRIGRVVFGVRNAKTGAAGSLMDVLHYPGMNHRVEITEGILADECAALLCYFFRMPRQVFNAQKKAQSSTDLTFKEDIQKAQVSGQGDSLHEHIANLAGSPAIKKGILQTVKVVDELVKVMGRHKPENIVIEMARENQTTQKGQKNSRERMKRIEEGIKELGSQILKEHPVENTQLQNEKLYLYYLQNGRDMYVDQELDINRLSDYDVDHIVPQSFLKDDSIDNKVLTRSDKNRGKSDNVPSEEVVKKMKNYWRQLLNAKLITQRKFDNLTKAERGGLSELDKAGFIKRQLVETRQITKHVAQILDSRMNTKYDENDKLIREVKVITLKSKLVSDFRKDFQFYKVREINNYHHAHDAYLNAVVGTALIKKYPKLESEFVYGDYKVYDVRKMIAKSEQEIGKATAKYFFYSNIMNFFKTEITLANGEIRKRPLIETNGETGEIVWDKGRDFATVRKVLSMPQVNIVKKTEVQTGGFSKESILPKRNSDKLIARKKDWDPKKYGGFDSPTVAYSVLVVAKVEKGKSKKLKSVKELLGITIMERSSFEKNPIDFLEAKGYKEVKKDLIIKLPKYSLFELENGRKRMLASAGELQKGNELALPSKYVNFLYLASHYEKLKGSPEDNEQKQLFVEQHKHYLDEIIEQISEFSKRVILADANLDKVLSAYNKHRDKPIREQAENIIHLFTLTNLGAPAAFKYFDTTIDRKRYTSTKEVLDATLIHQSITGLYETRIDLSQLGGD

SEQ ID NO: 296 - protein, 1554 aa, synthetic construct
  REGION 1..1554: note = 120 Cas9 TadACP136ins 1248 polypeptide sequence
MDKKYSIGLAIGTNSVGWAVITDEYKVPSKKFKVLGNTDRHSIKKNLIGALLFDSGETAEATRLKRTARRRYTRRKNRICYLQEIFSNEMAKVDDSFFHRLEESFLVEEDKKHERHPIFGNIVDEVAYHEKYPTIYHLRKKLVDSTDKADLRLIYLALAHMIKFRGHFLIEGDLNPDNSDVDKLFIQLVQTYNQLFEENPINASGVDAKAILSARLSKSRRLENLIAQLPGEKKNGLFGNLIALSLGLTPNFKSNFDLAEDAKLQLSKDTYDDDLDNLLAQIGDQYADLFLAAKNLSDAILLSDILRVNTEITKAPLSASMIKRYDEHHQDLTLLKALVRQQLPEKYKEIFFDQSKNGYAGYIDGGASQEEFYKFIKPILEKMDGTEELLVKLNREDLLRKQRTFDNGSIPHQIHLGELHAILRRQEDFYPFLKDNREKIEKILTFRIPYYVGPLARGNSRFAWMTRKSEETITPWNFEEVVDKGASAQSFIERMTNFDKNLPNEKVLPKHSLLYEYFTVYNELTKVKYVTEGMRKPAFLSGEQKKAIVDLLFKTNRKVTVKQLKEDYFKKIECFDSVEISGVEDRFNASLGTYHDLLKIIKDKDFLDNEENEDILEDIVLTLTLFEDREMIEERLKTYAHLFDDKVMKQLKRRRYTGWGRLSRKLINGIRDKQSGKTILDFLKSDGFANRNFMQLIHDDSLTFKEDIQKAQVSGQGDSLHEHIANLAGSPAIKKGILQTVKVVDELVKVMGRHKPENIVIEMARENQTTQKGQKNSRERMKRIEEGIKELGSQILKEHPVENTQLQNEKLYLYYLQNGRDMYVDQELDINRLSDYDVDHIVPQSFLKDDSIDNKVLTRSDKNRGKSDNVPSEEVVKKMKNYWRQLLNAKLITQRKFDNLTKAERGGLSELDKAGFIKRQLVETRQITKHVAQILDSRMNTKYDENDKLIREVKVITLKSKLVSDFRKDFQFYKVREINNYHHAHDAYLNAVVGTALIKKYPKLESEFVYGDYKVYDVRKMIAKSEQEIGKATAKYFFYSNIMNFFKTEITLANGEIRKRPLIETNGETGEIVWDKGRDFATVRKVLSMPQVNIVKKTEVQTGGFSKESILPKRNSDKLIARKKDWDPKKYGGFDSPTVAYSVLVVAKVEKGKSKKLKSVKELLGITIMERSSFEKNPIDFLEAKGYKEVKKDLIIKLPKYSLFELENGRKRMLASAGELQKGNELALPSKYVNFLYLASHYEKLKGSMNHRVEITEGILADECAALLCYFFRMPRQVFNAQKKAQSSTDGSSGSETPGTSESATPESSGSEVEFSHEYWMRHALTLAKRARDEREVPVGAVLVLNNRVIGEGWNRAIGLHDPTAHAEIMALRQGGLVMQNYRLIDATLYVTFEPCVMCAGAMIHSRIGRVVFGVRNAKTGAAGSLMDVLHYPGPEDNEQKQLFVEQHKHYLDEIIEQISEFSKRVILADANLDKVLSAYNKHRDKPIREQAENIIHLFTLTNLGAPAAFKYFDTTIDRKRYTSTKEVLDATLIHQSITGLYETRIDLSQLGGD

SEQ ID NO: 297 - protein, 1554 aa, synthetic construct
  REGION 1..1554: note = 121 Cas9 TadACP136ins 1052 polypeptide sequence
MDKKYSIGLAIGTNSVGWAVITDEYKVPSKKFKVLGNTDRHSIKKNLIGALLFDSGETAEATRLKRTARRRYTRRKNRICYLQEIFSNEMAKVDDSFFHRLEESFLVEEDKKHERHPIFGNIVDEVAYHEKYPTIYHLRKKLVDSTDKADLRLIYLALAHMIKFRGHFLIEGDLNPDNSDVDKLFIQLVQTYNQLFEENPINASGVDAKAILSARLSKSRRLENLIAQLPGEKKNGLFGNLIALSLGLTPNFKSNFDLAEDAKLQLSKDTYDDDLDNLLAQIGDQYADLFLAAKNLSDAILLSDILRVNTEITKAPLSASMIKRYDEHHQDLTLLKALVRQQLPEKYKEIFFDQSKNGYAGYIDGGASQEEFYKFIKPILEKMDGTEELLVKLNREDLLRKQRTFDNGSIPHQIHLGELHAILRRQEDFYPFLKDNREKIEKILTFRIPYYVGPLARGNSRFAWMTRKSEETITPWNFEEVVDKGASAQSFIERMTNFDKNLPNEKVLPKHSLLYEYFTVYNELTKVKYVTEGMRKPAFLSGEQKKAIVDLLFKTNRKVTVKQLKEDYFKKIECFDSVEISGVEDRFNASLGTYHDLLKIIKDKDFLDNEENEDILEDIVLTLTLFEDREMIEERLKTYAHLFDDKVMKQLKRRRYTGWGRLSRKLINGIRDKQSGKTILDFLKSDGFANRNFMQLIHDDSLTFKEDIQKAQVSGQGDSLHEHIANLAGSPAIKKGILQTVKVVDELVKVMGRHKPENIVIEMARENQTTQKGQKNSRERMKRIEEGIKELGSQILKEHPVENTQLQNEKLYLYYLQNGRDMYVDQELDINRLSDYDVDHIVPQSFLKDDSIDNKVLTRSDKNRGKSDNVPSEEVVKKMKNYWRQLLNAKLITQRKFDNLTKAERGGLSELDKAGFIKRQLVETRQITKHVAQILDSRMNTKYDENDKLIREVKVITLKSKLVSDFRKDFQFYKVREINNYHHAHDAYLNAVVGTALIKKYPKLESEFVYGDYKVYDVRKMIAKSEQEIGKATAKYFFYSNIMNFFKTEITLAMNHRVEITEGILADECAALLCYFFRMPRQVFNAQKKAQSSTDGSSGSETPGTSESATPESSGSEVEFSHEYWMRHALTLAKRARDEREVPVGAVLVLNNRVIGEGWNRAIGLHDPTAHAEIMALRQGGLVMQNYRLIDATLYVTFEPCVMCAGAMIHSRIGRVVFGVRNAKTGAAGSLMDVLHYPGNGEIRKRPLIETNGETGEIVWDKGRDFATVRKVLSMPQVNIVKKTEVQTGGFSKESILPKRNSDKLIARKKDWDPKKYGGFDSPTVAYSVLVVAKVEKGKSKKLKSVKELLGITIMERSSFEKNPIDFLEAKGYKEVKKDLIIKLPKYSLFELENGRKRMLASAGELQKGNELALPSKYVNFLYLASHYEKLKGSPEDNEQKQLFVEQHKHYLDEIIEQISEFSKRVILADANLDKVLSAYNKHRDKPIREQAENIIHLFTLTNLGAPAAFKYFDTTIDRKRYTSTKEVLDATLIHQSITGLYETRIDLSQLGGD

SEQ ID NO: 298 - protein, 1554 aa, synthetic construct
  REGION 1..1554: note = 122 Cas9 TadACP136ins 1041 polypeptide sequence
MDKKYSIGLAIGTNSVGWAVITDEYKVPSKKFKVLGNTDRHSIKKNLIGALLFDSGETAEATRLKRTARRRYTRRKNRICYLQEIFSNEMAKVDDSFFHRLEESFLVEEDKKHERHPIFGNIVDEVAYHEKYPTIYHLRKKLVDSTDKADLRLIYLALAHMIKFRGHFLIEGDLNPDNSDVDKLFIQLVQTYNQLFEENPINASGVDAKAILSARLSKSRRLENLIAQLPGEKKNGLFGNLIALSLGLTPNFKSNFDLAEDAKLQLSKDTYDDDLDNLLAQIGDQYADLFLAAKNLSDAILLSDILRVNTEITKAPLSASMIKRYDEHHQDLTLLKALVRQQLPEKYKEIFFDQSKNGYAGYIDGGASQEEFYKFIKPILEKMDGTEELLVKLNREDLLRKQRTFDNGSIPHQIHLGELHAILRRQEDFYPFLKDNREKIEKILTFRIPYYVGPLARGNSRFAWMTRKSEETITPWNFEEVVDKGASAQSFIERMTNFDKNLPNEKVLPKHSLLYEYFTVYNELTKVKYVTEGMRKPAFLSGEQKKAIVDLLFKTNRKVTVKQLKEDYFKKIECFDSVEISGVEDRFNASLGTYHDLLKIIKDKDFLDNEENEDILEDIVLTLTLFEDREMIEERLKTYAHLFDDKVMKQLKRRRYTGWGRLSRKLINGIRDKQSGKTILDFLKSDGFANRNFMQLIHDDSLTFKEDIQKAQVSGQGDSLHEHIANLAGSPAIKKGILQTVKVVDELVKVMGRHKPENIVIEMARENQTTQKGQKNSRERMKRIEEGIKELGSQILKEHPVENTQLQNEKLYLYYLQNGRDMYVDQELDINRLSDYDVDHIVPQSFLKDDSIDNKVLTRSDKNRGKSDNVPSEEVVKKMKNYWRQLLNAKLITQRKFDNLTKAERGGLSELDKAGFIKRQLVETRQITKHVAQILDSRMNTKYDENDKLIREVKVITLKSKLVSDFRKDFQFYKVREINNYHHAHDAYLNAVVGTALIKKYPKLESEFVYGDYKVYDVRKMIAKSEQEIGKATAKYFFYSMNHRVEITEGILADECAALLCYFFRMPRQVFNAQKKAQSSTDGSSGSETPGTSESATPESSGSEVEFSHEYWMRHALTLAKRARDEREVPVGAVLVLNNRVIGEGWNRAIGLHDPTAHAEIMALRQGGLVMQNYRLIDATLYVTFEPCVMCAGAMIHSRIGRVVFGVRNAKTGAAGSLMDVLHYPGNIMNFFKTEITLANGEIRKRPLIETNGETGEIVWDKGRDFATVRKVLSMPQVNIVKKTEVQTGGFSKESILPKRNSDKLIARKKDWDPKKYGGFDSPTVAYSVLVVAKVEKGKSKKLKSVKELLGITIMERSSFEKNPIDFLEAKGYKEVKKDLIIKLPKYSLFELENGRKRMLASAGELQKGNELALPSKYVNFLYLASHYEKLKGSPEDNEQKQLFVEQHKHYLDEIIEQISEFSKRVILADANLDKVLSAYNKHRDKPIREQAENIIHLFTLTNLGAPAAFKYFDTTIDRKRYTSTKEVLDATLIHQSITGLYETRIDLSQLGGD

SEQ ID NO: 299 - protein, 1554 aa, synthetic construct
  REGION 1..1554: note = 123 Cas9 TadACP139ins 1299 polypeptide sequence
MDKKYSIGLAIGTNSVGWAVITDEYKVPSKKFKVLGNTDRHSIKKNLIGALLFDSGETAEATRLKRTARRRYTRRKNRICYLQEIFSNEMAKVDDSFFHRLEESFLVEEDKKHERHPIFGNIVDEVAYHEKYPTIYHLRKKLVDSTDKADLRLIYLALAHMIKFRGHFLIEGDLNPDNSDVDKLFIQLVQTYNQLFEENPINASGVDAKAILSARLSKSRRLENLIAQLPGEKKNGLFGNLIALSLGLTPNFKSNFDLAEDAKLQLSKDTYDDDLDNLLAQIGDQYADLFLAAKNLSDAILLSDILRVNTEITKAPLSASMIKRYDEHHQDLTLLKALVRQQLPEKYKEIFFDQSKNGYAGYIDGGASQEEFYKFIKPILEKMDGTEELLVKLNREDLLRKQRTFDNGSIPHQIHLGELHAILRRQEDFYPFLKDNREKIEKILTFRIPYYVGPLARGNSRFAWMTRKSEETITPWNFEEVVDKGASAQSFIERMTNFDKNLPNEKVLPKHSLLYEYFTVYNELTKVKYVTEGMRKPAFLSGEQKKAIVDLLFKTNRKVTVKQLKEDYFKKIECFDSVEISGVEDRFNASLGTYHDLLKIIKDKDFLDNEENEDILEDIVLTLTLFEDREMIEERLKTYAHLFDDKVMKQLKRRRYTGWGRLSRKLINGIRDKQSGKTILDFLKSDGFANRNFMQLIHDDSLTFKEDIQKAQVSGQGDSLHEHIANLAGSPAIKKGILQTVKVVDELVKVMGRHKPENIVIEMARENQTTQKGQKNSRERMKRIEEGIKELGSQILKEHPVENTQLQNEKLYLYYLQNGRDMYVDQELDINRLSDYDVDHIVPQSFLKDDSIDNKVLTRSDKNRGKSDNVPSEEVVKKMKNYWRQLLNAKLITQRKFDNLTKAERGGLSELDKAGFIKRQLVETRQITKHVAQILDSRMNTKYDENDKLIREVKVITLKSKLVSDFRKDFQFYKVREINNYHHAHDAYLNAVVGTALIKKYPKLESEFVYGDYKVYDVRKMIAKSEQEIGKATAKYFFYSNIMNFFKTEITLANGEIRKRPLIETNGETGEIVWDKGRDFATVRKVLSMPQVNIVKKTEVQTGGFSKESILPKRNSDKLIARKKDWDPKKYGGFDSPTVAYSVLVVAKVEKGKSKKLKSVKELLGITIMERSSFEKNPIDFLEAKGYKEVKKDLIIKLPKYSLFELENGRKRMLASAGELQKGNELALPSKYVNFLYLASHYEKLKGSPEDNEQKQLFVEQHKHYLDEIIEQISEFSKRVILADANLDKVLSAYNKHRMNHRVEITEGILADECAALLCYFFRMPRQVFNAQKKAQSSTDGSSGSETPGTSESATPESSGSEVEFSHEYWMRHALTLAKRARDEREVPVGAVLVLNNRVIGEGWNRAIGLHDPTAHAEIMALRQGGLVMQNYRLIDATLYVTFEPCVMCAGAMIHSRIGRVVFGVRNAKTGAAGSLMDVLHYPGDKPIREQAENIIHLFTLTNLGAPAAFKYFDTTIDRKRYTSTKEVLDATLIHQSITGLYETRIDLSQLGGD

SEQ ID NO: 300 - protein, 1454 aa, synthetic construct
  REGION 1..1454: note = 124 Cas9 delta 792-872TadAins polypeptide sequence
MDKKYSIGLAIGTNSVGWAVITDEYKVPSKKFKVLGNTDRHSIKKNLIGALLFDSGETAEATRLKRTARRRYTRRKNRICYLQEIFSNEMAKVDDSFFHRLEESFLVEEDKKHERHPIFGNIVDEVAYHEKYPTIYHLRKKLVDSTDKADLRLIYLALAHMIKFRGHFLIEGDLNPDNSDVDKLFIQLVQTYNQLFEENPINASGVDAKAILSARLSKSRRLENLIAQLPGEKKNGLFGNLIALSLGLTPNFKSNFDLAEDAKLQLSKDTYDDDLDNLLAQIGDQYADLFLAAKNLSDAILLSDILRVNTEITKAPLSASMIKRYDEHHQDLTLLKALVRQQLPEKYKEIFFDQSKNGYAGYIDGGASQEEFYKFIKPILEKMDGTEELLVKLNREDLLRKQRTFDNGSIPHQIHLGELHAILRRQEDFYPFLKDNREKIEKILTFRIPYYVGPLARGNSRFAWMTRKSEETITPWNFEEVVDKGASAQSFIERMTNFDKNLPNEKVLPKHSLLYEYFTVYNELTKVKYVTEGMRKPAFLSGEQKKAIVDLLFKTNRKVTVKQLKEDYFKKIECFDSVEISGVEDRFNASLGTYHDLLKIIKDKDFLDNEENEDILEDIVLTLTLFEDREMIEERLKTYAHLFDDKVMKQLKRRRYTGWGRLSRKLINGIRDKQSGKTILDFLKSDGFANRNFMQLIHDDSLTFKEDIQKAQVSGQGDSLHEHIANLAGSPAIKKGILQTVKVVDELVKVMGRHKPENIVIEMARENQTTQKGQKNSRERMKRIEEGIKELGSEVEFSHEYWMRHALTLAKRARDEREVPVGAVLVLNNRVIGEGWNRAIGLHDPTAHAEIMALRQGGLVMQNYRLIDATLYVTFEPCVMCAGAMIHSRIGRVVFGVRNAKTGAAGSLMDVLHYPGMNHRVEITEGILADECAALLCYFFRMPRQVFNAQKKAQSSTDEEVVKKMKNYWRQLLNAKLITQRKFDNLTKAERGGLSELDKAGFIKRQLVETRQITKHVAQILDSRMNTKYDENDKLIREVKVITLKSKLVSDFRKDFQFYKVREINNYHHAHDAYLNAVVGTALIKKYPKLESEFVYGDYKVYDVRKMIAKSEQEIGKATAKYFFYSNIMNFFKTEITLANGEIRKRPLIETNGETGEIVWDKGRDFATVRKVLSMPQVNIVKKTEVQTGGFSKESILPKRNSDKLIARKKDWDPKKYGGFDSPTVAYSVLVVAKVEKGKSKKLKSVKELLGITIMERSSFEKNPIDFLEAKGYKEVKKDLIIKLPKYSLFELENGRKRMLASAGELQKGNELALPSKYVNFLYLASHYEKLKGSPEDNEQKQLFVEQHKHYLDEIIEQISEFSKRVILADANLDKVLSAYNKHRDKPIREQAENIIHLFTLTNLGAPAAFKYFDTTIDRKRYTSTKEVLDATLIHQSITGLYETRIDLSQLGGD

SEQ ID NO: 301 - protein, 1420 aa, synthetic construct
  REGION 1..1420: note = 125 Cas9 delta 792-906TadAins polypeptide sequence
MDKKYSIGLAIGTNSVGWAVITDEYKVPSKKFKVLGNTDRHSIKKNLIGALLFDSGETAEATRLKRTARRRYTRRKNRICYLQEIFSNEMAKVDDSFFHRLEESFLVEEDKKHERHPIFGNIVDEVAYHEKYPTIYHLRKKLVDSTDKADLRLIYLALAHMIKFRGHFLIEGDLNPDNSDVDKLFIQLVQTYNQLFEENPINASGVDAKAILSARLSKSRRLENLIAQLPGEKKNGLFGNLIALSLGLTPNFKSNFDLAEDAKLQLSKDTYDDDLDNLLAQIGDQYADLFLAAKNLSDAILLSDILRVNTEITKAPLSASMIKRYDEHHQDLTLLKALVRQQLPEKYKEIFFDQSKNGYAGYIDGGASQEEFYKFIKPILEKMDGTEELLVKLNREDLLRKQRTFDNGSIPHQIHLGELHAILRRQEDFYPFLKDNREKIEKILTFRIPYYVGPLARGNSRFAWMTRKSEETITPWNFEEVVDKGASAQSFIERMTNFDKNLPNEKVLPKHSLLYEYFTVYNELTKVKYVTEGMRKPAFLSGEQKKAIVDLLFKTNRKVTVKQLKEDYFKKIECFDSVEISGVEDRFNASLGTYHDLLKIIKDKDFLDNEENEDILEDIVLTLTLFEDREMIEERLKTYAHLFDDKVMKQLKRRRYTGWGRLSRKLINGIRDKQSGKTILDFLKSDGFANRNFMQLIHDDSLTFKEDIQKAQVSGQGDSLHEHIANLAGSPAIKKGILQTVKVVDELVKVMGRHKPENIVIEMARENQTTQKGQKNSRERMKRIEEGIKELGSEVEFSHEYWMRHALTLAKRARDEREVPVGAVLVLNNRVIGEGWNRAIGLHDPTAHAEIMALRQGGLVMQNYRLIDATLYVTFEPCVMCAGAMIHSRIGRVVFGVRNAKTGAAGSLMDVLHYPGMNHRVEITEGILADECAALLCYFFRMPRQVFNAQKKAQSSTDGLSELDKAGFIKRQLVETRQITKHVAQILDSRMNTKYDENDKLIREVKVITLKSKLVSDFRKDFQFYKVREINNYHHAHDAYLNAVVGTALIKKYPKLESEFVYGDYKVYDVRKMIAKSEQEIGKATAKYFFYSNIMNFFKTEITLANGEIRKRPLIETNGETGEIVWDKGRDFATVRKVLSMPQVNIVKKTEVQTGGFSKESILPKRNSDKLIARKKDWDPKKYGGFDSPTVAYSVLVVAKVEKGKSKKLKSVKELLGITIMERSSFEKNPIDFLEAKGYKEVKKDLIIKLPKYSLFELENGRKRMLASAGELQKGNELALPSKYVNFLYLASHYEKLKGSPEDNEQKQLFVEQHKHYLDEIIEQISEFSKRVILADANLDKVLSAYNKHRDKPIREQAENIIHLFTLTNLGAPAAFKYFDTTIDRKRYTSTKEVLDATLIHQSITGLYETRIDLSQLGGD

SEQ ID NO: 302 - protein, 1554 aa, synthetic construct
  REGION 1..1554: note = 126 TadA CP65ins 1003 polypeptide sequence
MDKKYSIGLAIGTNSVGWAVITDEYKVPSKKFKVLGNTDRHSIKKNLIGALLFDSGETAEATRLKRTARRRYTRRKNRICYLQEIFSNEMAKVDDSFFHRLEESFLVEEDKKHERHPIFGNIVDEVAYHEKYPTIYHLRKKLVDSTDKADLRLIYLALAHMIKFRGHFLIEGDLNPDNSDVDKLFIQLVQTYNQLFEENPINASGVDAKAILSARLSKSRRLENLIAQLPGEKKNGLFGNLIALSLGLTPNFKSNFDLAEDAKLQLSKDTYDDDLDNLLAQIGDQYADLFLAAKNLSDAILLSDILRVNTEITKAPLSASMIKRYDEHHQDLTLLKALVRQQLPEKYKEIFFDQSKNGYAGYIDGGASQEEFYKFIKPILEKMDGTEELLVKLNREDLLRKQRTFDNGSIPHQIHLGELHAILRRQEDFYPFLKDNREKIEKILTFRIPYYVGPLARGNSRFAWMTRKSEETITPWNFEEVVDKGASAQSFIERMTNFDKNLPNEKVLPKHSLLYEYFTVYNELTKVKYVTEGMRKPAFLSGEQKKAIVDLLFKTNRKVTVKQLKEDYFKKIECFDSVEISGVEDRFNASLGTYHDLLKIIKDKDFLDNEENEDILEDIVLTLTLFEDREMIEERLKTYAHLFDDKVMKQLKRRRYTGWGRLSRKLINGIRDKQSGKTILDFLKSDGFANRNFMQLIHDDSLTFKEDIQKAQVSGQGDSLHEHIANLAGSPAIKKGILQTVKVVDELVKVMGRHKPENIVIEMARENQTTQKGQKNSRERMKRIEEGIKELGSQILKEHPVENTQLQNEKLYLYYLQNGRDMYVDQELDINRLSDYDVDHIVPQSFLKDDSIDNKVLTRSDKNRGKSDNVPSEEVVKKMKNYWRQLLNAKLITQRKFDNLTKAERGGLSELDKAGFIKRQLVETRQITKHVAQILDSRMNTKYDENDKLIREVKVITLKSKLVSDFRKDFQFYKVREINNYHHAHDAYLNAVVGTALIKKYPKTAHAEIMALRQGGLVMQNYRLIDATLYVTFEPCVMCAGAMIHSRIGRVVFGVRNAKTGAAGSLMDVLHYPGMNHRVEITEGILADECAALLCYFFRMPRQVFNAQKKAQSSTDGSSGSETPGTSESATPESSGSEVEFSHEYWMRHALTLAKRARDEREVPVGAVLVLNNRVIGEGWNRAIGLHDPLESEFVYGDYKVYDVRKMIAKSEQEIGKATAKYFFYSNIMNFFKTEITLANGEIRKRPLIETNGETGEIVWDKGRDFATVRKVLSMPQVNIVKKTEVQTGGFSKESILPKRNSDKLIARKKDWDPKKYGGFDSPTVAYSVLVVAKVEKGKSKKLKSVKELLGITIMERSSFEKNPIDFLEAKGYKEVKKDLIIKLPKYSLFELENGRKRMLASAGELQKGNELALPSKYVNFLYLASHYEKLKGSPEDNEQKQLFVEQHKHYLDEIIEQISEFSKRVILADANLDKVLSAYNKHRDKPIREQAENIIHLFTLTNLGAPAAFKYFDTTIDRKRYTSTKEVLDATLIHQSITGLYETRIDLSQLGGD

SEQ ID NO: 303 - protein, 1554 aa, synthetic construct
  REGION 1..1554: note = 127 TadA CP65ins 1016 polypeptide sequence
MDKKYSIGLAIGTNSVGWAVITDEYKVPSKKFKVLGNTDRHSIKKNLIGALLFDSGETAEATRLKRTARRRYTRRKNRICYLQEIFSNEMAKVDDSFFHRLEESFLVEEDKKHERHPIFGNIVDEVAYHEKYPTIYHLRKKLVDSTDKADLRLIYLALAHMIKFRGHFLIEGDLNPDNSDVDKLFIQLVQTYNQLFEENPINASGVDAKAILSARLSKSRRLENLIAQLPGEKKNGLFGNLIALSLGLTPNFKSNFDLAEDAKLQLSKDTYDDDLDNLLAQIGDQYADLFLAAKNLSDAILLSDILRVNTEITKAPLSASMIKRYDEHHQDLTLLKALVRQQLPEKYKEIFFDQSKNGYAGYIDGGASQEEFYKFIKPILEKMDGTEELLVKLNREDLLRKQRTFDNGSIPHQIHLGELHAILRRQEDFYPFLKDNREKIEKILTFRIPYYVGPLARGNSRFAWMTRKSEETITPWNFEEVVDKGASAQSFIERMTNFDKNLPNEKVLPKHSLLYEYFTVYNELTKVKYVTEGMRKPAFLSGEQKKAIVDLLFKTNRKVTVKQLKEDYFKKIECFDSVEISGVEDRFNASLGTYHDLLKIIKDKDFLDNEENEDILEDIVLTLTLFEDREMIEERLKTYAHLFDDKVMKQLKRRRYTGWGRLSRKLINGIRDKQSGKTILDFLKSDGFANRNFMQLIHDDSLTFKEDIQKAQVSGQGDSLHEHIANLAGSPAIKKGILQTVKVVDELVKVMGRHKPENIVIEMARENQTTQKGQKNSRERMKRIEEGIKELGSQILKEHPVENTQLQNEKLYLYYLQNGRDMYVDQELDINRLSDYDVDHIVPQSFLKDDSIDNKVLTRSDKNRGKSDNVPSEEVVKKMKNYWRQLLNAKLITQRKFDNLTKAERGGLSELDKAGFIKRQLVETRQITKHVAQILDSRMNTKYDENDKLIREVKVITLKSKLVSDFRKDFQFYKVREINNYHHAHDAYLNAVVGTALIKKYPKLESEFVYGDYKVTAHAEIMALRQGGLVMQNYRLIDATLYVTFEPCVMCAGAMIHSRIGRVVFGVRNAKTGAAGSLMDVLHYPGMNHRVEITEGILADECAALLCYFFRMPRQVFNAQKKAQSSTDGSSGSETPGTSESATPESSGSEVEFSHEYWMRHALTLAKRARDEREVPVGAVLVLNNRVIGEGWNRAIGLHDPYDVRKMIAKSEQEIGKATAKYFFYSNIMNFFKTEITLANGEIRKRPLIETNGETGEIVWDKGRDFATVRKVLSMPQVNIVKKTEVQTGGFSKESILPKRNSDKLIARKKDWDPKKYGGFDSPTVAYSVLVVAKVEKGKSKKLKSVKELLGITIMERSSFEKNPIDFLEAKGYKEVKKDLIIKLPKYSLFELENGRKRMLASAGELQKGNELALPSKYVNFLYLASHYEKLKGSPEDNEQKQLFVEQHKHYLDEIIEQISEFSKRVILADANLDKVLSAYNKHRDKPIREQAENIIHLFTLTNLGAPAAFKYFDTTIDRKRYTSTKEVLDATLIHQSITGLYETRIDLSQLGGD

SEQ ID NO: 304 - protein, 1554 aa, synthetic construct
  REGION 1..1554: note = 128 TadA CP65ins 1022 polypeptide sequence
MDKKYSIGLAIGTNSVGWAVITDEYKVPSKKFKVLGNTDRHSIKKNLIGALLFDSGETAEATRLKRTARRRYTRRKNRICYLQEIFSNEMAKVDDSFFHRLEESFLVEEDKKHERHPIFGNIVDEVAYHEKYPTIYHLRKKLVDSTDKADLRLIYLALAHMIKFRGHFLIEGDLNPDNSDVDKLFIQLVQTYNQLFEENPINASGVDAKAILSARLSKSRRLENLIAQLPGEKKNGLFGNLIALSLGLTPNFKSNFDLAEDAKLQLSKDTYDDDLDNLLAQIGDQYADLFLAAKNLSDAILLSDILRVNTEITKAPLSASMIKRYDEHHQDLTLLKALVRQQLPEKYKEIFFDQSKNGYAGYIDGGASQEEFYKFIKPILEKMDGTEELLVKLNREDLLRKQRTFDNGSIPHQIHLGELHAILRRQEDFYPFLKDNREKIEKILTFRIPYYVGPLARGNSRFAWMTRKSEETITPWNFEEVVDKGASAQSFIERMTNFDKNLPNEKVLPKHSLLYEYFTVYNELTKVKYVTEGMRKPAFLSGEQKKAIVDLLFKTNRKVTVKQLKEDYFKKIECFDSVEISGVEDRFNASLGTYHDLLKIIKDKDFLDNEENEDILEDIVLTLTLFEDREMIEERLKTYAHLFDDKVMKQLKRRRYTGWGRLSRKLINGIRDKQSGKTILDFLKSDGFANRNFMQLIHDDSLTFKEDIQKAQVSGQGDSLHEHIANLAGSPAIKKGILQTVKVVDELVKVMGRHKPENIVIEMARENQTTQKGQKNSRERMKRIEEGIKELGSQILKEHPVENTQLQNEKLYLYYLQNGRDMYVDQELDINRLSDYDVDHIVPQSFLKDDSIDNKVLTRSDKNRGKSDNVPSEEVVKKMKNYWRQLLNAKLITQRKFDNLTKAERGGLSELDKAGFIKRQLVETRQITKHVAQILDSRMNTKYDENDKLIREVKVITLKSKLVSDFRKDFQFYKVREINNYHHAHDAYLNAVVGTALIKKYPKLESEFVYGDYKVYDVRKMITAHAEIMALRQGGLVMQNYRLIDATLYVTFEPCVMCAGAMIHSRIGRVVFGVRNAKTGAAGSLMDVLHYPGMNHRVEITEGILADECAALLCYFFRMPRQVFNAQKKAQSSTDGSSGSETPGTSESATPESSGSEVEFSHEYWMRHALTLAKRARDEREVPVGAVLVLNNRVIGEGWNRAIGLHDPAKSEQEIGKATAKYFFYSNIMNFFKTEITLANGEIRKRPLIETNGETGEIVWDKGRDFATVRKVLSMPQVNIVKKTEVQTGGFSKESILPKRNSDKLIARKKDWDPKKYGGFDSPTVAYSVLVVAKVEKGKSKKLKSVKELLGITIMERSSFEKNPIDFLEAKGYKEVKKDLIIKLPKYSLFELENGRKRMLASAGELQKGNELALPSKYVNFLYLASHYEKLKGSPEDNEQKQLFVEQHKHYLDEIIEQISEFSKRVILADANLDKVLSAYNKHRDKPIREQAENIIHLFTLTNLGAPAAFKYFDTTIDRKRYTSTKEVLDATLIHQSITGLYETRIDLSQLGGD

SEQ ID NO: 305 - protein, 1554 aa, synthetic construct
  REGION 1..1554: note = 129 TadA CP65ins 1029 polypeptide sequence
MDKKYSIGLAIGTNSVGWAVITDEYKVPSKKFKVLGNTDRHSIKKNLIGALLFDSGETAEATRLKRTARRRYTRRKNRICYLQEIFSNEMAKVDDSFFHRLEESFLVEEDKKHERHPIFGNIVDEVAYHEKYPTIYHLRKKLVDSTDKADLRLIYLALAHMIKFRGHFLIEGDLNPDNSDVDKLFIQLVQTYNQLFEENPINASGVDAKAILSARLSKSRRLENLIAQLPGEKKNGLFGNLIALSLGLTPNFKSNFDLAEDAKLQLSKDTYDDDLDNLLAQIGDQYADLFLAAKNLSDAILLSDILRVNTEITKAPLSASMIKRYDEHHQDLTLLKALVRQQLPEKYKEIFFDQSKNGYAGYIDGGASQEEFYKFIKPILEKMDGTEELLVKLNREDLLRKQRTFDNGSIPHQIHLGELHAILRRQEDFYPFLKDNREKIEKILTFRIPYYVGPLARGNSRFAWMTRKSEETITPWNFEEVVDKGASAQSFIERMTNFDKNLPNEKVLPKHSLLYEYFTVYNELTKVKYVTEGMRKPAFLSGEQKKAIVDLLFKTNRKVTVKQLKEDYFKKIECFDSVEISGVEDRFNASLGTYHDLLKIIKDKDFLDNEENEDILEDIVLTLTLFEDREMIEERLKTYAHLFDDKVMKQLKRRRYTGWGRLSRKLINGIRDKQSGKTILDFLKSDGFANRNFMQLIHDDSLTFKEDIQKAQVSGQGDSLHEHIANLAGSPAIKKGILQTVKVVDELVKVMGRHKPENIVIEMARENQTTQKGQKNSRERMKRIEEGIKELGSQILKEHPVENTQLQNEKLYLYYLQNGRDMYVDQELDINRLSDYDVDHIVPQSFLKDDSIDNKVLTRSDKNRGKSDNVPSEEVVKKMKNYWRQLLNAKLITQRKFDNLTKAERGGLSELDKAGFIKRQLVETRQITKHVAQILDSRMNTKYDENDKLIREVKVITLKSKLVSDFRKDFQFYKVREINNYHHAHDAYLNAVVGTALIKKYPKLESEFVYGDYKVYDVRKMIAKSEQEITAHAEIMALRQGGLVMQNYRLIDATLYVTFEPCVMCAGAMIHSRIGRVVFGVRNAKTGAAGSLMDVLHYPGMNHRVEITEGILADECAALLCYFFRMPRQVFNAQKKAQSSTDGSSGSETPGTSESATPESSGSEVEFSHEYWMRHALTLAKRARDEREVPVGAVLVLNNRVIGEGWNRAIGLHDPGKATAKYFFYSNIMNFFKTEITLANGEIRKRPLIETNGETGEIVWDKGRDFATVRKVLSMPQVNIVKKTEVQTGGFSKESILPKRNSDKLIARKKDWDPKKYGGFDSPTVAYSVLVVAKVEKGKSKKLKSVKELLGITIMERSSFEKNPIDFLEAKGYKEVKKDLIIKLPKYSLFELENGRKRMLASAGELQKGNELALPSKYVNFLYLASHYEKLKGSPEDNEQKQLFVEQHKHYLDEIIEQISEFSKRVILADANLDKVLSAYNKHRDKPIREQAENIIHLFTLTNLGAPAAFKYFDTTIDRKRYTSTKEVLDATLIHQSITGLYETRIDLSQLGGD

SEQ ID NO: 306 - protein, 1554 aa, synthetic construct
  REGION 1..1554: note = 130 TadA CP65ins 1041 polypeptide sequence
MDKKYSIGLAIGTNSVGWAVITDEYKVPSKKFKVLGNTDRHSIKKNLIGALLFDSGETAEATRLKRTARRRYTRRKNRICYLQEIFSNEMAKVDDSFFHRLEESFLVEEDKKHERHPIFGNIVDEVAYHEKYPTIYHLRKKLVDSTDKADLRLIYLALAHMIKFRGHFLIEGDLNPDNSDVDKLFIQLVQTYNQLFEENPINASGVDAKAILSARLSKSRRLENLIAQLPGEKKNGLFGNLIALSLGLTPNFKSNFDLAEDAKLQLSKDTYDDDLDNLLAQIGDQYADLFLAAKNLSDAILLSDILRVNTEITKAPLSASMIKRYDEHHQDLTLLKALVRQQLPEKYKEIFFDQSKNGYAGYIDGGASQEEFYKFIKPILEKMDGTEELLVKLNREDLLRKQRTFDNGSIPHQIHLGELHAILRRQEDFYPFLKDNREKIEKILTFRIPYYVGPLARGNSRFAWMTRKSEETITPWNFEEVVDKGASAQSFIERMTNFDKNLPNEKVLPKHSLLYEYFTVYNELTKVKYVTEGMRKPAFLSGEQKKAIVDLLFKTNRKVTVKQLKEDYFKKIECFDSVEISGVEDRFNASLGTYHDLLKIIKDKDFLDNEENEDILEDIVLTLTLFEDREMIEERLKTYAHLFDDKVMKQLKRRRYTGWGRLSRKLINGIRDKQSGKTILDFLKSDGFANRNFMQLIHDDSLTFKEDIQKAQVSGQGDSLHEHIANLAGSPAIKKGILQTVKVVDELVKVMGRHKPENIVIEMARENQTTQKGQKNSRERMKRIEEGIKELGSQILKEHPVENTQLQNEKLYLYYLQNGRDMYVDQELDINRLSDYDVDHIVPQSFLKDDSIDNKVLTRSDKNRGKSDNVPSEEVVKKMKNYWRQLLNAKLITQRKFDNLTKAERGGLSELDKAGFIKRQLVETRQITKHVAQILDSRMNTKYDENDKLIREVKVITLKSKLVSDFRKDFQFYKVREINNYHHAHDAYLNAVVGTALIKKYPKLESEFVYGDYKVYDVRKMIAKSEQEIGKATAKYFFYSTAHAEIMALRQGGLVMQNYRLIDATLYVTFEPCVMCAGAMIHSRIGRVVFGVRNAKTGAAGSLMDVLHYPGMNHRVEITEGILADECAALLCYFFRMPRQVFNAQKKAQSSTDGSSGSETPGTSESATPESSGSEVEFSHEYWMRHALTLAKRARDEREVPVGAVLVLNNRVIGEGWNRAIGLHDPNIMNFFKTEITLANGEIRKRPLIETNGETGEIVWDKGRDFATVRKVLSMPQVNIVKKTEVQTGGFSKESILPKRNSDKLIARKKDWDPKKYGGFDSPTVAYSVLVVAKVEKGKSKKLKSVKELLGITIMERSSFEKNPIDFLEAKGYKEVKKDLIIKLPKYSLFELENGRKRMLASAGELQKGNELALPSKYVNFLYLASHYEKLKGSPEDNEQKQLFVEQHKHYLDEIIEQISEFSKRVILADANLDKVLSAYNKHRDKPIREQAENIIHLFTLTNLGAPAAFKYFDTTIDRKRYTSTKEVLDATLIHQSITGLYETRIDLSQLGGD

SEQ ID NO: 307 - protein, 1554 aa, synthetic construct
  REGION 1..1554: note = 131 TadA CP65ins 1054 polypeptide sequence
MDKKYSIGLAIGTNSVGWAVITDEYKVPSKKFKVLGNTDRHSIKKNLIGALLFDSGETAEATRLKRTARRRYTRRKNRICYLQEIFSNEMAKVDDSFFHRLEESFLVEEDKKHERHPIFGNIVDEVAYHEKYPTIYHLRKKLVDSTDKADLRLIYLALAHMIKFRGHFLIEGDLNPDNSDVDKLFIQLVQTYNQLFEENPINASGVDAKAILSARLSKSRRLENLIAQLPGEKKNGLFGNLIALSLGLTPNFKSNFDLAEDAKLQLSKDTYDDDLDNLLAQIGDQYADLFLAAKNLSDAILLSDILRVNTEITKAPLSASMIKRYDEHHQDLTLLKALVRQQLPEKYKEIFFDQSKNGYAGYIDGGASQEEFYKFIKPILEKMDGTEELLVKLNREDLLRKQRTFDNGSIPHQIHLGELHAILRRQEDFYPFLKDNREKIEKILTFRIPYYVGPLARGNSRFAWMTRKSEETITPWNFEEVVDKGASAQSFIERMTNFDKNLPNEKVLPKHSLLYEYFTVYNELTKVKYVTEGMRKPAFLSGEQKKAIVDLLFKTNRKVTVKQLKEDYFKKIECFDSVEISGVEDRFNASLGTYHDLLKIIKDKDFLDNEENEDILEDIVLTLTLFEDREMIEERLKTYAHLFDDKVMKQLKRRRYTGWGRLSRKLINGIRDKQSGKTILDFLKSDGFANRNFMQLIHDDSLTFKEDIQKAQVSGQGDSLHEHIANLAGSPAIKKGILQTVKVVDELVKVMGRHKPENIVIEMARENQTTQKGQKNSRERMKRIEEGIKELGSQILKEHPVENTQLQNEKLYLYYLQNGRDMYVDQELDINRLSDYDVDHIVPQSFLKDDSIDNKVLTRSDKNRGKSDNVPSEEVVKKMKNYWRQLLNAKLITQRKFDNLTKAERGGLSELDKAGFIKRQLVETRQITKHVAQILDSRMNTKYDENDKLIREVKVITLKSKLVSDFRKDFQFYKVREINNYHHAHDAYLNAVVGTALIKKYPKLESEFVYGDYKVYDVRKMIAKSEQEIGKATAKYFFYSNIMNFFKTEITLANTAHAEIMALRQGGLVMQNYRLIDATLYVTFEPCVMCAGAMIHSRIGRVVFGVRNAKTGAAGSLMDVLHYPGMNHRVEITEGILADECAALLCYFFRMPRQVFNAQKKAQSSTDGSSGSETPGTSESATPESSGSEVEFSHEYWMRHALTLAKRARDEREVPVGAVLVLNNRVIGEGWNRAIGLHDPGEIRKRPLIETNGETGEIVWDKGRDFATVRKVLSMPQVNIVKKTEVQTGGFSKESILPKRNSDKLIARKKDWDPKKYGGFDSPTVAYSVLVVAKVEKGKSKKLKSVKELLGITIMERSSFEKNPIDFLEAKGYKEVKKDLIIKLPKYSLFELENGRKRMLASAGELQKGNELALPSKYVNFLYLASHYEKLKGSPEDNEQKQLFVEQHKHYLDEIIEQISEFSKRVILADANLDKVLSAYNKHRDKPIREQAENIIHLFTLTNLGAPAAFKYFDTTIDRKRYTSTKEVLDATLIHQSITGLYETRIDLSQLGGD

SEQ ID NO: 308 - protein, 1554 aa, synthetic construct
  REGION 1..1554: note = 132 TadA CP65ins 1246 polypeptide sequence
MDKKYSIGLAIGTNSVGWAVITDEYKVPSKKFKVLGNTDRHSIKKNLIGALLFDSGETAEATRLKRTARRRYTRRKNRICYLQEIFSNEMAKVDDSFFHRLEESFLVEEDKKHERHPIFGNIVDEVAYHEKYPTIYHLRKKLVDSTDKADLRLIYLALAHMIKFRGHFLIEGDLNPDNSDVDKLFIQLVQTYNQLFEENPINASGVDAKAILSARLSKSRRLENLIAQLPGEKKNGLFGNLIALSLGLTPNFKSNFDLAEDAKLQLSKDTYDDDLDNLLAQIGDQYADLFLAAKNLSDAILLSDILRVNTEITKAPLSASMIKRYDEHHQDLTLLKALVRQQLPEKYKEIFFDQSKNGYAGYIDGGASQEEFYKFIKPILEKMDGTEELLVKLNREDLLRKQRTFDNGSIPHQIHLGELHAILRRQEDFYPFLKDNREKIEKILTFRIPYYVGPLARGNSRFAWMTRKSEETITPWNFEEVVDKGASAQSFIERMTNFDKNLPNEKVLPKHSLLYEYFTVYNELTKVKYVTEGMRKPAFLSGEQKKAIVDLLFKTNRKVTVKQLKEDYFKKIECFDSVEISGVEDRFNASLGTYHDLLKIIKDKDFLDNEENEDILEDIVLTLTLFEDREMIEERLKTYAHLFDDKVMKQLKRRRYTGWGRLSRKLINGIRDKQSGKTILDFLKSDGFANRNFMQLIHDDSLTFKEDIQKAQVSGQGDSLHEHIANLAGSPAIKKGILQTVKVVDELVKVMGRHKPENIVIEMARENQTTQKGQKNSRERMKRIEEGIKELGSQILKEHPVENTQLQNEKLYLYYLQNGRDMYVDQELDINRLSDYDVDHIVPQSFLKDDSIDNKVLTRSDKNRGKSDNVPSEEVVKKMKNYWRQLLNAKLITQRKFDNLTKAERGGLSELDKAGFIKRQLVETRQITKHVAQILDSRMNTKYDENDKLIREVKVITLKSKLVSDFRKDFQFYKVREINNYHHAHDAYLNAVVGTALIKKYPKLESEFVYGDYKVYDVRKMIAKSEQEIGKATAKYFFYSNIMNFFKTEITLANGEIRKRPLIETNGETGEIVWDKGRDFATVRKVLSMPQVNIVKKTEVQTGGFSKESILPKRNSDKLIARKKDWDPKKYGGFDSPTVAYSVLVVAKVEKGKSKKLKSVKELLGITIMERSSFEKNPIDFLEAKGYKEVKKDLIIKLPKYSLFELENGRKRMLASAGELQKGNELALPSKYVNFLYLASHYEKLKGTAHAEIMALRQGGLVMQNYRLIDATLYVTFEPCVMCAGAMIHSRIGRVVFGVRNAKTGAAGSLMDVLHYPGMNHRVEITEGILADECAALLCYFFRMPRQVFNAQKKAQSSTDGSSGSETPGTSESATPESSGSEVEFSHEYWMRHALTLAKRARDEREVPVGAVLVLNNRVIGEGWNRAIGLHDPSPEDNEQKQLFVEQHKHYLDEIIEQISEFSKRVILADANLDKVLSAYNKHRDKPIREQAENIIHLFTLTNLGAPAAFKYFDTTIDRKRYTSTKEVLDATLIHQSITGLYETRIDLSQLGGD

SEQ ID NO: 309 - protein, 160 aa, Staphylococcus aureus
  REGION 1..160: note = MISC_FEATURE - TadA polypeptide sequence
MGSHMTNDIYFMTLAIEEAKKAAQLGEVPIGAIITKDDEVIARAHNLRETLQQPTAHAEHIAIERAAKVLGSWRLEGCTLYVTLEPCVMCAGTIVMSRIPRVVYGADDPKGGCSGSLMNLLQQSNFNHRAIVDKGVLKEACSTLLTTFFKNLRANKKSTN

SEQ ID NO: 310 - protein, 161 aa, Bacillus subtilis
  REGION 1..161: note = MISC_FEATURE - TadA polypeptide sequence
MTQDELYMKEAIKEAKKAEEKGEVPIGAVLVINGEIIARAHNLRETEQRSIAHAEMLVIDEACKALGTWRLEGATLYVTLEPCPMCAGAVVLSRVEKVVFGAFDPKGGCSGTLMNLLQEERFNHQAEVVSGVLEEECGGMLSAFFRELRKKKKAARKNLSE

SEQ ID NO: 311 - protein, 183 aa, Salmonella enterica
  REGION 1..183: note = MISC_FEATURE - TadA polypeptide sequence
  source 1..183: note = serovar Typhimurium
MPPAFITGVTSLSDVELDHEYWMRHALTLAKRAWDEREVPVGAVLVHNHRVIGEGWNRPIGRHDPTAHAEIMALRQGGLVLQNYRLLDTTLYVTLEPCVMCAGAMVHSRIGRVVFGARDAKTGAAGSLIDVLHHPGMNHRVEIIEGVLRDECATLLSDFFRMRRQEIKALKKADRAEGAGPAV

SEQ ID NO: 312 - protein, 164 aa, Shewanella putrefaciens
  REGION 1..164: note = MISC_FEATURE - TadA polypeptide sequence
MDEYWMQVAMQMAEKAEAAGEVPVGAVLVKDGQQIATGYNLSISQHDPTAHAEILCLRSAGKKLENYRLLDATLYITLEPCAMCAGAMVHSRIARVVYGARDEKTGAAGTVVNLLQHPAFNHQVEVTSGVLAEACSAQLSRFFKRRRDEKKALKLAQRAQQGIE

SEQ ID NO: 313 - protein, 173 aa, Haemophilus influenzae
  REGION 1..173: note = MISC_FEATURE - TadA polypeptide sequence
MDAAKVRSEFDEKMMRYALELADKAEALGEIPVGAVLVDDARNIIGEGWNLSIVQSDPTAHAEIIALRNGAKNIQNYRLLNSTLYVTLEPCTMCAGAILHSRIKRLVFGASDYKTGAIGSRFHFFDDYKMNHTLEITSGVLAEECSQKLSTFFQKRREEKKIEKALLKSLSDK

SEQ ID NO: 314 - protein, 161 aa, Caulobacter crescentus
  REGION 1..161: note = MISC_FEATURE - TadA polypeptide sequence
MRTDESEDQDHRMMRLALDAARAAAEAGETPVGAVILDPSTGEVIATAGNGPIAAHDPTAHAEIAAMRAAAAKLGNYRLTDLTLVVTLEPCAMCAGAISHARIGRVVFGADDPKGGAVVHGPKFFAQPTCHWRPEVTGGVLADESADLLRGFFRARRKAKI

SEQ ID NO: 315 - protein, 179 aa, Geobacter sulfurreducens
  REGION 1..179: note = MISC_FEATURE - TadA polypeptide sequence
MSSLKKTPIRDDAYWMGKAIREAAKAAARDEVPIGAVIVRDGAVIGRGHNLREGSNDPSAHAEMIAIRQAARRSANWRLTGATLYVTLEPCLMCMGAIILARLERVVFGCYDPKGGAAGSLYDLSADPRLNHQVRLSPGVCQEECGTMLSDFFRDLRRRKKAKATPALFIDERKVPPEP

SEQ ID NO: 316 - protein, 167 aa, synthetic construct
  REGION 1..167: note = TadA*8 polypeptide sequence
MSEVEFSHEYWMRHALTLAKRARDEREVPVGAVLVLNNRVIGEGWNRAIGLHDPTAHAEIMALRQGGLVMQNYRLIDATLYVTFEPCVMCAGAMIHSRIGRVVFGVRNAKTGAAGSLMDVLHYPGMNHRVEITEGILADECAALLCTFFRMPRQVFNAQKKAQSSTD

SEQ ID NO: 317 - RNA, 80 nt, synthetic construct
  misc_feature 1..80: note = gRNA scaffold polynucleotide sequence
  source 1..80: mol_type = other RNA
gttttagagctagaaatagcaagttaaaataaggctagtccgttatcaacttgaaaaagtggcaccgagtcggtgctttt

SEQ ID NO: 318 - RNA, 125 nt, synthetic construct
  misc_feature 1..125: note = gRNA scaffold polynucleotide sequence
  source 1..125: mol_type = other RNA
gtttttgtactctcaagatttaagtaactgtacaacgaaacttacacagttacttaaatcttgcagaagctacaaagataaggcttcatgccgaaatcaacaccctgtcattttatggcagggtg

SEQ ID NO: 319 - RNA, 76 nt, Streptococcus pyogenes
  misc_feature 1..76: note = S. pyogenes gRNA scaffold oligonucleotide sequence
  source 1..76: mol_type = other RNA
gttttagagctagaaatagcaagttaaaataaggctagtccgttatcaacttgaaaaagtggcaccgagtcggtgc

SEQ ID NO: 320 - RNA, 84 nt, Staphylococcus aureus
  misc_feature 1..84: note = S. aureus gRNA scaffold oligonucleotide sequence
  source 1..84: mol_type = other RNA
gttttagtactctgtaatgaaaattacagaatctactaaaacaaggcaaaatgccgtgtttatctcgtcaacttgttggcgaga

SEQ ID NO: 321 - RNA, 97 nt, Bacillus hisashii
  misc_feature 1..97: note = BhCas12b gRNA scaffold oligonucleotide sequence
  source 1..97: mol_type = other RNA
gttctgtcttttggtcaggacaaccgtctagctataagtgctgcagggtgtgagaaactcctattgctggacgatgtctcttacgaggcattagcac

SEQ ID NO: 322 - RNA, 88 nt, Bacillus sp.
  misc_feature 1..88: note = BvCas12b gRNA scaffold oligonucleotide sequence
  source 1..88: mol_type = other RNA
gacctatagggtcaatgaatctgtgcgtgtgccataagtaattaaaaattacccaccacaggagcacctgaaaacaggtgcttggcac

SEQ ID NO: 323 - RNA, 80 nt, synthetic construct
  misc_feature 1..80: note = gRNA scaffold nucleotide sequence; oligonucleotide sequence
  modified_base 78..80: mod_base = um
  misc_feature 78..80: note = In embodiments, a nucleotide(s) is linked to the preceding 5' nucleotide by a 3' phosphorothioate internucleotide linkage
  source 1..80: mol_type = other RNA
gttttagagctagaaatagcaagttaaaataaggctagtccgttatcaacttgaaaaagtgggaccgagtcggtgctttt

SEQ ID NO: 324 - RNA, 80 nt, synthetic construct; identical to SEQ ID NO: 317
  misc_feature 1..80: note = gRNA scaffold nucleotide sequence
  misc_feature 78..80: note = In embodiments, a nucleotide(s) is linked to the preceding 5' nucleotide by a 3' phosphorothioate internucleotide linkage
  modified_base 78..80: mod_base = um
  source 1..80: mol_type = other RNA

SEQ ID NO: 325 - RNA, 117 nt, Bacillus hisashii
  misc_feature 1..117: note = BhCas12b gRNA scaffold + guide sequence; oligonucleotide sequence
  misc_feature 1..97: note = BhCas12b sgRNA scaffold
  source 1..117: mol_type = other RNA
gttctgtcttttggtcaggacaaccgtctagctataagtgctgcagggtgtgagaaactcctattgctggacgatgtctcttacgaggcattagcacnnnnnnnnnnnnnnnnnnnn

SEQ ID NO: 326 - RNA, 108 nt, Bacillus sp.
  misc_feature 1..108: note = BvCas12b gRNA scaffold + guide sequence; oligonucleotide sequence
  misc_feature 1..88: note = BvCas12b gRNA scaffold
  source 1..108: mol_type = other RNA
gacctatagggtcaatgaatctgtgcgtgtgccataagtaattaaaaattacccaccacaggagcacctgaaaacaggtgcttggcacnnnnnnnnnnnnnnnnnnnn

SEQ ID NO: 327 - RNA, 119 nt, Alicyclobacillus acidiphilus
  misc_feature 1..119: note = AaCas12b gRNA scaffold + guide sequence; oligonucleotide sequence
  misc_feature 1..99: note = AaCas12b gRNA scaffold
  source 1..119: mol_type = other RNA
gtctaaaggacagaatttttcaacgggtgtgccaatggccactttccaggtggcaaagcccgttgaacttctcaaaaagaacgatctgagaagtggcacnnnnnnnnnnnnnnnnnnnn

SEQ ID NO: 328 - protein, 29 aa, synthetic construct
  REGION 1..29: note = synthetic polypeptide sequence
PKKKRKVEGADKRTADGSEFESPKKKRKV

SEQ ID NO: 329 - protein, 23 aa, synthetic construct
  REGION 1..23: note = synthetic peptide sequence
RKSGKIAAIVVKRPRKPKKKRKV

SEQ ID NO: 330 - protein, 8 aa, synthetic construct
  REGION 1..8: note = synthetic peptide sequence
SGGSSGGS

SEQ ID NO: 331 - protein, 1609 aa, synthetic construct
  REGION 1..1609: note = pNMG-B335ABE8.1_Y147T_CP5_NGC PAM_monomer polypeptide sequence
MSEVEFSHEYWMRHALTLAKRARDEREVPVGAVLVLNNRVIGEGWNRAIGLHDPTAHAEIMALRQGGLVMQNYRLIDATLYVTFEPCVMCAGAMIHSRIGRVVFGVRNAKTGAAGSLMDVLHYPGMNHRVEITEGILADECAALLCTFFRMPRQVFNAQKKAQSSTDSGGSSGGSSGSETPGTSESATPESSGGSSGGSEIGKATAKYFFYSNIMNFFKTEITLANGEIRKRPLIETNGETGEIVWDKGRDFATVRKVLSMPQVNIVKKTEVQTGGFSKESILPKRNSDKLIARKKDWDPKKYGGFMQPTVAYSVLVVAKVEKGKSKKLKSVKELLGITIMERSSFEKNPIDFLEAKGYKEVKKDLIIKLPKYSLFELENGRKRMLASAKFLQKGNELALPSKYVNFLYLASHYEKLKGSPEDNEQKQLFVEQHKHYLDEIIEQISEFSKRVILADANLDKVLSAYNKHRDKPIREQAENIIHLFTLTNLGAPRAFKYFDTTIARKEYRSTKEVLDATLIHQSITGLYETRIDLSQLGGDGGSGGSGGSGGSGGSGGSGGMDKKYSIGLAIGTNSVGWAVITDEYKVPSKKFKVLGNTDRHSIKKNLIGALLFDSGETAEATRLKRTARRRYTRRKNRICYLQEIFSNEMAKVDDSFFHRLEESFLVEEDKKHERHPIFGNIVDEVAYHEKYPTIYHLRKKLVDSTDKADLRLIYLALAHMIKFRGHFLIEGDLNPDNSDVDKLFIQLVQTYNQLFEENPINASGVDAKAILSARLSKSRRLENLIAQLPGEKKNGLFGNLIALSLGLTPNFKSNFDLAEDAKLQLSKDTYDDDLDNLLAQIGDQYADLFLAAKNLSDAILLSDILRVNTEITKAPLSASMIKRYDEHHQDLTLLKALVRQQLPEKYKEIFFDQSKNGYAGYIDGGASQEEFYKFIKPILEKMDGTEELLVKLNREDLLRKQRTFDNGSIPHQIHLGELHAILRRQEDFYPFLKDNREKIEKILTFRIPYYVGPLARGNSRFAWMTRKSEETITPWNFEEVVDKGASAQSFIERMTNFDKNLPNEKVLPKHSLLYEYFTVYNELTKVKYVTEGMRKPAFLSGEQKKAIVDLLFKTNRKVTVKQLKEDYFKKIECFDSVEISGVEDRFNASLGTYHDLLKIIKDKDFLDNEENEDILEDIVLTLTLFEDREMIEERLKTYAHLFDDKVMKQLKRRRYTGWGRLSRKLINGIRDKQSGKTILDFLKSDGFANRNFMQLIHDDSLTFKEDIQKAQVSGQGDSLHEHIANLAGSPAIKKGILQTVKVVDELVKVMGRHKPENIVIEMARENQTTQKGQKNSRERMKRIEEGIKELGSQILKEHPVENTQLQNEKLYLYYLQNGRDMYVDQELDINRLSDYDVDHIVPQSFLKDDSIDNKVLTRSDKNRGKSDNVPSEEVVKKMKNYWRQLLNAKLITQRKFDNLTKAERGGLSELDKAGFIKRQLVETRQITKHVAQILDSRMNTKYDENDKLIREVKVITLKSKLVSDFRKDFQFYKVREINNYHHAHDAYLNAVVGTALIKKYPKLESEFVYGDYKVYDVRKMIAKSEQEGADKRTADGSEFESPKKKRKV

SEQ ID NO: 332 - protein, 1807 aa, synthetic construct
  REGION 1..1807: note = pNMG-357_ABE8.14 with NGC PAMCP5 polypeptide sequence
  REGION 1..174: note = MISC_FEATURE - Adenosine deaminase sequence
  REGION 175..198: note = MISC_FEATURE - Linker sequence
  REGION 199..365: note = MISC_FEATURE - Adenosine deaminase sequence
  REGION 366..397: note = MISC_FEATURE - Linker sequence
  REGION 398..738: note = MISC_FEATURE - Sequence derived from Cas9
  REGION 739..759: note = MISC_FEATURE - Linker sequence
  REGION 760..1785: note = MISC_FEATURE - Sequence derived from Cas9
  REGION 1786..1807: note = MISC_FEATURE - Bipartite nuclear localization sequence
MSEVEFSHEYWMRHALTLAKRAWDEREVPVGAVLVHNNRVIGEGWNRPIGRHDPTAHAEIMALRQGGLVMQNYRLIDATLYVTLEPCVMCAGAMIHSRIGRVVFGARDAKTGAAGSLMDVLHHPGMNHRVEITEGILADECAALLSDFFRMRRQEIKAQKKAQSSTDGGSSGGSSGSETPGTSESATPESSGGSSGGSMSEVEFSHEYWMRHALTLAKRARDEREVPVGAVLVLNNRVIGEGWNRAIGLHDPTAHAEIMALRQGGLVMQNYRLIDATLYVTFEPCVMCAGAMIHSRIGRVVFGVRNAKTGAAGSLMDVLHYPGMNHRVEITEGILADECAALLCTFFRMPRQVFNAQKKAQSSTDSGGSSGGSSGSETPGTSESATPESSGGSSGGSEIGKATAKYFFYSNIMNFFKTEITLANGEIRKRPLIETNGETGEIVWDKGRDFATVRKVLSMPQVNIVKKTEVQTGGFSKESILPKRNSDKLIARKKDWDPKKYGGFMQPTVAYSVLVVAKVEKGKSKKLKSVKELLGITIMERSSFEKNPIDFLEAKGYKEVKKDLIIKLPKYSLFELENGRKRMLASAKFLQKGNELALPSKYVNFLYLASHYEKLKGSPEDNEQKQLFVEQHKHYLDEIIEQISEFSKRVILADANLDKVLSAYNKHRDKPIREQAENIIHLFTLTNLGAPRAFKYFDTTIARKEYRSTKEVLDATLIHQSITGLYETRIDLSQLGGDGGSGGSGGSGGSGGSGGSGGMDKKYSIGLAIGTNSVGWAVITDEYKVPSKKFKVLGNTDRHSIKKNLIGALLFDSGETAEATRLKRTARRRYTRRKNRICYLQEIFSNEMAKVDDSFFHRLEESFLVEEDKKHERHPIFGNIVDEVAYHEKYPTIYHLRKKLVDSTDKADLRLIYLALAHMIKFRGHFLIEGDLNPDNSDVDKLFIQLVQTYNQLFEENPINASGVDAKAILSARLSKSRRLENLIAQLPGEKKNGLFGNLIALSLGLTPNFKSNFDLAEDAKLQLSKDTYDDDLDNLLAQIGDQYADLFLAAKNLSDAILLSDILRVNTEITKAPLSASMIKRYDEHHQDLTLLKALVRQQLPEKYKEIFFDQSKNGYAGYIDGGASQEEFYKFIKPILEKMDGTEELLVKLNREDLLRKQRTFDNGSIPHQIHLGELHAILRRQEDFYPFLKDNREKIEKILTFRIPYYVGPLARGNSRFAWMTRKSEETITPWNFEEVVDKGASAQSFIERMTNFDKNLPNEKVLPKHSLLYEYFTVYNELTKVKYVTEGMRKPAFLSGEQKKAIVDLLFKTNRKVTVKQLKEDYFKKIECFDSVEISGVEDRFNASLGTYHDLLKIIKDKDFLDNEENEDILEDIVLTLTLFEDREMIEERLKTYAHLFDDKVMKQLKRRRYTGWGRLSRKLINGIRDKQSGKTILDFLKSDGFANRNFMQLIHDDSLTFKEDIQKAQVSGQGDSLHEHIANLAGSPAIKKGILQTVKVVDELVKVMGRHKPENIVIEMARENQTTQKGQKNSRERMKRIEEGIKELGSQILKEHPVENTQLQNEKLYLYYLQNGRDMYVDQELDINRLSDYDVDHIVPQSFLKDDSIDNKVLTRSDKNRGKSDNVPSEEVVKKMKNYWRQLLNAKLITQRKFDNLTKAERGGLSELDKAGFIKRQLVETRQITKHVAQILDSRMNTKYDENDKLIREVKVITLKSKLVSDFRKDFQFYKVREINNYHHAHDAYLNAVVGTALIKKYPKLESEFVYGDYKVYDVRKMIAKSEQEGADKRTADGSEFESPKKKRKV

SEQ ID NO: 333 - protein, 1588 aa, synthetic construct
  REGION 1..1588: note = ABE8.8-m polypeptide sequence
  REGION 1..167: note = MISC_FEATURE - Adenosine deaminase sequence
  REGION 168..199: note = MISC_FEATURE - Linker sequence
  REGION 200..1566: note = MISC_FEATURE - Sequence derived from Cas9
  REGION 1567..1588: note = MISC_FEATURE - Bipartite nuclear localization sequence
MSEVEFSHEYWMRHALTLAKRARDEREVPVGAVLVLNNRVIGEGWNRAIGLHDPTAHAEIMALRQGGLVMQNYRLIDATLYVTFEPCVMCAGAMIHSRIGRVVFGVRNAKTGAAGSLMDVLHHPGMNHRVEITEGILADECAALLCRFFRMPRRVFNAQKKAQSSTDSGGSSGGSSGSETPGTSESATPESSGGSSGGSDKKYSIGLAIGTNSVGWAVITDEYKVPSKKFKVLGNTDRHSIKKNLIGALLFDSGETAEATRLKRTARRRYTRRKNRICYLQEIFSNEMAKVDDSFFHRLEESFLVEEDKKHERHPIFGNIVDEVAYHEKYPTIYHLRKKLVDSTDKADLRLIYLALAHMIKFRGHFLIEGDLNPDNSDVDKLFIQLVQTYNQLFEENPINASGVDAKAILSARLSKSRRLENLIAQLPGEKKNGLFGNLIALSLGLTPNFKSNFDLAEDAKLQLSKDTYDDDLDNLLAQIGDQYADLFLAAKNLSDAILLSDILRVNTEITKAPLSASMIKRYDEHHQDLTLLKALVRQQLPEKYKEIFFDQSKNGYAGYIDGGASQEEFYKFIKPILEKMDGTEELLVKLNREDLLRKQRTFDNGSIPHQIHLGELHAILRRQEDFYPFLKDNREKIEKILTFRIPYYVGPLARGNSRFAWMTRKSEETITPWNFEEVVDKGASAQSFIERMTNFDKNLPNEKVLPKHSLLYEYFTVYNELTKVKYVTEGMRKPAFLSGEQKKAIVDLLFKTNRKVTVKQLKEDYFKKIECFDSVEISGVEDRFNASLGTYHDLLKIIKDKDFLDNEENEDILEDIVLTLTLFEDREMIEERLKTYAHLFDDKVMKQLKRRRYTGWGRLSRKLINGIRDKQSGKTILDFLKSDGFANRNFMQLIHDDSLTFKEDIQKAQVSGQGDSLHEHIANLAGSPAIKKGILQTVKVVDELVKVMGRHKPENIVIEMARENQTTQKGQKNSRERMKRIEEGIKELGSQILKEHPVENTQLQNEKLYLYYLQNGRDMYVDQELDINRLSDYDVDHIVPQSFLKDDSIDNKVLTRSDKNRGKSDNVPSEEVVKKMKNYWRQLLNAKLITQRKFDNLTKAERGGLSELDKAGFIKRQLVETRQITKHVAQILDSRMNTKYDENDKLIREVKVITLKSKLVSDFRKDFQFYKVREINNYHHAHDAYLNAVVGTALIKKYPKLESEFVYGDYKVYDVRKMIAKSEQEIGKATAKYFFYSNIMNFFKTEITLANGEIRKRPLIETNGETGEIVWDKGRDFATVRKVLSMPQVNIVKKTEVQTGGFSKESILPKRNSDKLIARKKDWDPKKYGGFDSPTVAYSVLVVAKVEKGKSKKLKSVKELLGITIMERSSFEKNPIDFLEAKGYKEVKKDLIIKLPKYSLFELENGRKRMLASAGELQKGNELALPSKYVNFLYLASHYEKLKGSPEDNEQKQLFVEQHKHYLDEIIEQISEFSKRVILADANLDKVLSAYNKHRDKPIREQAENIIHLFTLTNLGAPAAFKYFDTTIDRKRYTSTKEVLDATLIHQSITGLYETRIDLSQLGGDEGADKRTADGSEFESPKKKRKV

SEQ ID NO: 334 - protein, 1786 aa, synthetic construct
  REGION 1..1786: note = ABE8.8-d polypeptide sequence
  REGION 1..167: note = MISC_FEATURE - Adenosine deaminase sequence
  REGION 168..199: note = MISC_FEATURE - Linker sequence
  REGION 200..365: note = MISC_FEATURE - Adenosine deaminase sequence
  REGION 366..397: note = MISC_FEATURE - Linker sequence
  REGION 398..1764: note = MISC_FEATURE - Sequence derived from Cas9
  REGION 1765..1786: note = MISC_FEATURE - Bipartite nuclear localization sequence
MSEVEFSHEYWMRHALTLAKRAWDEREVPVGAVLVHNNRVIGEGWNRPIGRHDPTAHAEIMALRQGGLVMQNYRLIDATLYVTLEPCVMCAGAMIHSRIGRVVFGARDAKTGAAGSLMDVLHHPGMNHRVEITEGILADECAALLSDFFRMRRQEIKAQKKAQSSTDSGGSSGGSSGSETPGTSESATPESSGGSSGGSSEVEFSHEYWMRHALTLAKRARDEREVPVGAVLVLNNRVIGEGWNRAIGLHDPTAHAEIMALRQGGLVMQNYRLIDATLYVTFEPCVMCAGAMIHSRIGRVVFGVRNAKTGAAGSLMDVLHHPGMNHRVEITEGILADECAALLCRFFRMPRRVFNAQKKAQSSTDSGGSSGGSSGSETPGTSESATPESSGGSSGGSDKKYSIGLAIGTNSVGWAVITDEYKVPSKKFKVLGNTDRHSIKKNLIGALLFDSGETAEATRLKRTARRRYTRRKNRICYLQEIFSNEMAKVDDSFFHRLEESFLVEEDKKHERHPIFGNIVDEVAYHEKYPTIYHLRKKLVDSTDKADLRLIYLALAHMIKFRGHFLIEGDLNPDNSDVDKLFIQLVQTYNQLFEENPINASGVDAKAILSARLSKSRRLENLIAQLPGEKKNGLFGNLIALSLGLTPNFKSNFDLAEDAKLQLSKDTYDDDLDNLLAQIGDQYADLFLAAKNLSDAILLSDILRVNTEITKAPLSASMIKRYDEHHQDLTLLKALVRQQLPEKYKEIFFDQSKNGYAGYIDGGASQEEFYKFIKPILEKMDGTEELLVKLNREDLLRKQRTFDNGSIPHQIHLGELHAILRRQEDFYPFLKDNREKIEKILTFRIPYYVGPLARGNSRFAWMTRKSEETITPWNFEEVVDKGASAQSFIERMTNFDKNLPNEKVLPKHSLLYEYFTVYNELTKVKYVTEGMRKPAFLSGEQKKAIVDLLFKTNRKVTVKQLKEDYFKKIECFDSVEISGVEDRFNASLGTYHDLLKIIKDKDFLDNEENEDILEDIVLTLTLFEDREMIEERLKTYAHLFDDKVMKQLKRRRYTGWGRLSRKLINGIRDKQSGKTILDFLKSDGFANRNFMQLIHDDSLTFKEDIQKAQVSGQGDSLHEHIANLAGSPAIKKGILQTVKVVDELVKVMGRHKPENIVIEMARENQTTQKGQKNSRERMKRIEEGIKELGSQILKEHPVENTQLQNEKLYLYYLQNGRDMYVDQELDINRLSDYDVDHIVPQSFLKDDSIDNKVLTRSDKNRGKSDNVPSEEVVKKMKNYWRQLLNAKLITQRKFDNLTKAERGGLSELDKAGFIKRQLVETRQITKHVAQILDSRMNTKYDENDKLIREVKVITLKSKLVSDFRKDFQFYKVREINNYHHAHDAYLNAVVGTALIKKYPKLESEFVYGDYKVYDVRKMIAKSEQEIGKATAKYFFYSNIMNFFKTEITLANGEIRKRPLIETNGETGEIVWDKGRDFATVRKVLSMPQVNIVKKTEVQTGGFSKESILPKRNSDKLIARKKDWDPKKYGGFDSPTVAYSVLVVAKVEKGKSKKLKSVKELLGITIMERSSFEKNPIDFLEAKGYKEVKKDLIIKLPKYSLFELENGRKRMLASAGELQKGNELALPSKYVNFLYLASHYEKLKGSPEDNEQKQLFVEQHKHYLDEIIEQISEFSKRVILADANLDKVLSAYNKHRDKPIREQAENIIHLFTLTNLGAPAAFKYFDTTIDRKRYTSTKEVLDATLIHQSITGLYETRIDLSQLGGDEGADKRTADGSEFESPKKKRKV

SEQ ID NO: 335 - protein, 1588 aa, synthetic construct
  REGION 1..1588: note = ABE8.13-m polypeptide sequence
  REGION 1..167: note = MISC_FEATURE - Adenosine deaminase sequence
  REGION 168..199: note = MISC_FEATURE - Linker sequence
  REGION 200..1566: note = MISC_FEATURE - Sequence derived from Cas9
  REGION 1567..1588: note = MISC_FEATURE - Bipartite nuclear localization sequence
MSEVEFSHEYWMRHALTLAKRARDEREVPVGAVLVLNNRVIGEGWNRAIGLHDPTAHAEIMALRQGGLVMQNYRLYDATLYVTFEPCVMCAGAMIHSRIGRVVFGVRNAKTGAAGSLMDVLHHPGMNHRVEITEGILADECAALLCRFFRMPRRVFNAQKKAQSSTDSGGSSGGSSGSETPGTSESATPESSGGSSGGSDKKYSIGLAIGTNSVGWAVITDEYKVPSKKFKVLGNTDRHSIKKNLIGALLFDSGETAEATRLKRTARRRYTRRKNRICYLQEIFSNEMAKVDDSFFHRLEESFLVEEDKKHERHPIFGNIVDEVAYHEKYPTIYHLRKKLVDSTDKADLRLIYLALAHMIKFRGHFLIEGDLNPDNSDVDKLFIQLVQTYNQLFEENPINASGVDAKAILSARLSKSRRLENLIAQLPGEKKNGLFGNLIALSLGLTPNFKSNFDLAEDAKLQLSKDTYDDDLDNLLAQIGDQYADLFLAAKNLSDAILLSDILRVNTEITKAPLSASMIKRYDEHHQDLTLLKALVRQQLPEKYKEIFFDQSKNGYAGYIDGGASQEEFYKFIKPILEKMDGTEELLVKLNREDLLRKQRTFDNGSIPHQIHLGELHAILRRQEDFYPFLKDNREKIEKILTFRIPYYVGPLARGNSRFAWMTRKSEETITPWNFEEVVDKGASAQSFIERMTNFDKNLPNEKVLPKHSLLYEYFTVYNELTKVKYVTEGMRKPAFLSGEQKKAIVDLLFKTNRKVTVKQLKEDYFKKIECFDSVEISGVEDRFNASLGTYHDLLKIIKDKDFLDNEENEDILEDIVLTLTLFEDREMIEERLKTYAHLFDDKVMKQLKRRRYTGWGRLSRKLINGIRDKQSGKTILDFLKSDGFANRNFMQLIHDDSLTFKEDIQKAQVSGQGDSLHEHIANLAGSPAIKKGILQTVKVVDELVKVMGRHKPENIVIEMARENQTTQKGQKNSRERMKRIEEGIKELGSQILKEHPVENTQLQNEKLYLYYLQNGRDMYVDQELDINRLSDYDVDHIVPQSFLKDDSIDNKVLTRSDKNRGKSDNVPSEEVVKKMKNYWRQLLNAKLITQRKFDNLTKAERGGLSELDKAGFIKRQLVETRQITKHVAQILDSRMNTKYDENDKLIREVKVITLKSKLVSDFRKDFQFYKVREINNYHHAHDAYLNAVVGTALIKKYPKLESEFVYGDYKVYDVRKMIAKSEQEIGKATAKYFFYSNIMNFFKTEITLANGEIRKRPLIETNGETGEIVWDKGRDFATVRKVLSMPQVNIVKKTEVQTGGFSKESILPKRNSDKLIARKKDWDPKKYGGFDSPTVAYSVLVVAKVEKGKSKKLKSVKELLGITIMERSSFEKNPIDFLEAKGYKEVKKDLIIKLPKYSLFELENGRKRMLASAGELQKGNELALPSKYVNFLYLASHYEKLKGSPEDNEQKQLFVEQHKHYLDEIIEQISEFSKRVILADANLDKVLSAYNKHRDKPIREQAENIIHLFTLTNLGAPAAFKYFDTTIDRKRYTSTKEVLDATLIHQSITGLYETRIDLSQLGGDEGADKRTADGSEFESPKKKRKV

SEQ ID NO: 336 - protein, 1786 aa, synthetic construct
  REGION 1..1786: note = ABE8.13-d polypeptide sequence
  REGION 1..167: note = MISC_FEATURE - Adenosine deaminase sequence
  REGION 168..199: note = MISC_FEATURE - Linker sequence
  REGION 200..365: note = MISC_FEATURE - Adenosine deaminase sequence
  REGION 366..397: note = MISC_FEATURE - Linker sequence
  REGION 398..1764: note = MISC_FEATURE - Sequence derived from Cas9
  REGION 1765..1786: note = MISC_FEATURE - Bipartite nuclear localization sequence
MSEVEFSHEYWMRHALTLAKRAWDEREVPVGAVLVHNNRVIGEGWNRPIGRHDPTAHAEIMALRQGGLVMQNYRLIDATLYVTLEPCVMCAGAMIHSRIGRVVFGARDAKTGAAGSLMDVLHHPGMNHRVEITEGILADECAALLSDFFRMRRQEIKAQKKAQSSTDSGGSSGGSSGSETPGTSESATPESSGGSSGGSSEVEFSHEYWMRHALTLAKRARDEREVPVGAVLVLNNRVIGEGWNRAIGLHDPTAHAEIMALRQGGLVMQNYRLYDATLYVTFEPCVMCAGAMIHSRIGRVVFGVRNAKTGAAGSLMDVLHHPGMNHRVEITEGILADECAALLCRFFRMPRRVFNAQKKAQSSTDSGGSSGGSSGSETPGTSESATPESSGGSSGGSDKKYSIGLAIGTNSVGWAVITDEYKVPSKKFKVLGNTDRHSIKKNLIGALLFDSGETAEATRLKRTARRRYTRRKNRICYLQEIFSNEMAKVDDSFFHRLEESFLVEEDKKHERHPIFGNIVDEVAYHEKYPTIYHLRKKLVDSTDKADLRLIYLALAHMIKFRGHFLIEGDLNPDNSDVDKLFIQLVQTYNQLFEENPINASGVDAKAILSARLSKSRRLENLIAQLPGEKKNGLFGNLIALSLGLTPNFKSNFDLAEDAKLQLSKDTYDDDLDNLLAQIGDQYADLFLAAKNLSDAILLSDILRVNTEITKAPLSASMIKRYDEHHQDLTLLKALVRQQLPEKYKEIFFDQSKNGYAGYIDGGASQEEFYKFIKPILEKMDGTEELLVKLNREDLLRKQRTFDNGSIPHQIHLGELHAILRRQEDFYPFLKDNREKIEKILTFRIPYYVGPLARGNSRFAWMTRKSEETITPWNFEEVVDKGASAQSFIERMTNFDKNLPNEKVLPKHSLLYEYFTVYNELTKVKYVTEGMRKPAFLSGEQKKAIVDLLFKTNRKVTVKQLKEDYFKKIECFDSVEISGVEDRFNASLGTYHDLLKIIKDKDFLDNEENEDILEDIVLTLTLFEDREMIEERLKTYAHLFDDKVMKQLKRRRYTGWGRLSRKLINGIRDKQSGKTILDFLKSDGFANRNFMQLIHDDSLTFKEDIQKAQVSGQGDSLHEHIANLAGSPAIKKGILQTVKVVDELVKVMGRHKPENIVIEMARENQTTQKGQKNSRERMKRIEEGIKELGSQILKEHPVENTQLQNEKLYLYYLQNGRDMYVDQELDINRLSDYDVDHIVPQSFLKDDSIDNKVLTRSDKNRGKSDNVPSEEVVKKMKNYWRQLLNAKLITQRKFDNLTKAERGGLSELDKAGFIKRQLVETRQITKHVAQILDSRMNTKYDENDKLIREVKVITLKSKLVSDFRKDFQFYKVREINNYHHAHDAYLNAVVGTALIKKYPKLESEFVYGDYKVYDVRKMIAKSEQEIGKATAKYFFYSNIMNFFKTEITLANGEIRKRPLIETNGETGEIVWDKGRDFATVRKVLSMPQVNIVKKTEVQTGGFSKESILPKRNSDKLIARKKDWDPKKYGGFDSPTVAYSVLVVAKVEKGKSKKLKSVKELLGITIMERSSFEKNPIDFLEAKGYKEVKKDLIIKLPKYSLFELENGRKRMLASAGELQKGNELALPSKYVNFLYLASHYEKLKGSPEDNEQKQLFVEQHKHYLDEIIEQISEFSKRVILADANLDKVLSAYNKHRDKPIREQAENIIHLFTLTNLGAPAAFKYFDTTIDRKRYTSTKEVLDATLIHQSITGLYETRIDLSQLGGDEGADKRTADGSEFESPKKKRKV

SEQ ID NO: 337 - protein, 1588 aa, synthetic construct
  REGION 1..1588: note = ABE8.17-m polypeptide sequence
  REGION 1..167: note = MISC_FEATURE - Adenosine deaminase sequence
  REGION 168..199: note = MISC_FEATURE - Linker sequence
  REGION 200..1566: note = MISC_FEATURE - Sequence derived from Cas9
  REGION 1567..1588: note = MISC_FEATURE - Bipartite nuclear localization sequence
MSEVEFSHEYWMRHALTLAKRARDEREVPVGAVLVLNNRVIGEGWNRAIGLHDPTAHAEIMALRQGGLVMQNYRLIDATLYSTFEPCVMCAGAMIHSRIGRVVFGVRNAKTGAAGSLMDVLHYPGMNHRVEITEGILADECAALLCYFFRMPRRVFNAQKKAQSSTDSGGSSGGSSGSETPGTSESATPESSGGSSGGSDKKYSIGLAIGTNSVGWAVITDEYKVPSKKFKVLGNTDRHSIKKNLIGALLFDSGETAEATRLKRTARRRYTRRKNRICYLQEIFSNEMAKVDDSFFHRLEESFLVEEDKKHERHPIFGNIVDEVAYHEKYPTIYHLRKKLVDSTDKADLRLIYLALAHMIKFRGHFLIEGDLNPDNSDVDKLFIQLVQTYNQLFEENPINASGVDAKAILSARLSKSRRLENLIAQLPGEKKNGLFGNLIALSLGLTPNFKSNFDLAEDAKLQLSKDTYDDDLDNLLAQIGDQYADLFLAAKNLSDAILLSDILRVNTEITKAPLSASMIKRYDEHHQDLTLLKALVRQQLPEKYKEIFFDQSKNGYAGYIDGGASQEEFYKFIKPILEKMDGTEELLVKLNREDLLRKQRTFDNGSIPHQIHLGELHAILRRQEDFYPFLKDNREKIEKILTFRIPYYVGPLARGNSRFAWMTRKSEETITPWNFEEVVDKGASAQSFIERMTNFDKNLPNEKVLPKHSLLYEYFTVYNELTKVKYVTEGMRKPAFLSGEQKKAIVDLLFKTNRKVTVKQLKEDYFKKIECFDSVEISGVEDRFNASLGTYHDLLKIIKDKDFLDNEENEDILEDIVLTLTLFEDREMIEERLKTYAHLFDDKVMKQLKRRRYTGWGRLSRKLINGIRDKQSGKTILDFLKSDGFANRNFMQLIHDDSLTFKEDIQKAQVSGQGDSLHEHIANLAGSPAIKKGILQTVKVVDELVKVMGRHKPENIVIEMARENQTTQKGQKNSRERMKRIEEGIKELGSQILKEHPVENTQLQNEKLYLYYLQNGRDMYVDQELDINRLSDYDVDHIVPQSFLKDDSIDNKVLTRSDKNRGKSDNVPSEEVVKKMKNYWRQLLNAKLITQRKFDNLTKAERGGLSELDKAGFIKRQLVETRQITKHVAQILDSRMNTKYDENDKLIREVKVITLKSKLVSDFRKDFQFYKVREINNYHHAHDAYLNAVVGTALIKKYPKLESEFVYGDYKVYDVRKMIAKSEQEIGKATAKYFFYSNIMNFFKTEITLANGEIRKRPLIETNGETGEIVWDKGRDFATVRKVLSMPQVNIVKKTEVQTGGFSKESILPKRNSDKLIARKKDWDPKKYGGFDSPTVAYSVLVVAKVEKGKSKKLKSVKELLGITIMERSSFEKNPIDFLEAKGYKEVKKDLIIKLPKYSLFELENGRKRMLASAGELQKGNELALPSKYVNFLYLASHYEKLKGSPEDNEQKQLFVEQHKHYLDEIIEQISEFSKRVILADANLDKVLSAYNKHRDKPIREQAENIIHLFTLTNLGAPAAFKYFDTTIDRKRYTSTKEVLDATLIHQSITGLYETRIDLSQLGGDEGADKRTADGSEFESPKKKRKV

SEQ ID NO: 338 - protein, 1786 aa, synthetic construct
  REGION 1..1786: note = ABE8.17-d polypeptide sequence
  REGION 1..167: note = MISC_FEATURE - Adenosine deaminase sequence
  REGION 168..199: note = MISC_FEATURE - Linker sequence
  REGION 200..365: note = MISC_FEATURE - Adenosine deaminase sequence
  REGION 366..397: note = MISC_FEATURE - Linker sequence
  REGION 398..1764: note = MISC_FEATURE - Sequence derived from Cas9
  REGION 1765..1786: note = MISC_FEATURE - Bipartite nuclear localization sequence
MSEVEFSHEYWMRHALTLAKRAWDEREVPVGAVLVHNNRVIGEGWNRPIGRHDPTAHAEIMALRQGGLVMQNYRLIDATLYVTLEPCVMCAGAMIHSRIGRVVFGARDAKTGAAGSLMDVLHHPGMNHRVEITEGILADECAALLSDFFRMRRQEIKAQKKAQSSTDSGGSSGGSSGSETPGTSESATPESSGGSSGGSSEVEFSHEYWMRHALTLAKRARDEREVPVGAVLVLNNRVIGEGWNRAIGLHDPTAHAEIMALRQGGLVMQNYRLIDATLYSTFEPCVMCAGAMIHSRIGRVVFGVRNAKTGAAGSLMDVLHYPGMNHRVEITEGILADECAALLCYFFRMPRRVFNAQKKAQSSTDSGGSSGGSSGSETPGTSESATPESSGGSSGGSDKKYSIGLAIGTNSVGWAVITDEYKVPSKKFKVLGNTDRHSIKKNLIGALLFDSGETAEATRLKRTARRRYTRRKNRICYLQEIFSNEMAKVDDSFFHRLEESFLVEEDKKHERHPIFGNIVDEVAYHEKYPTIYHLRKKLVDSTDKADLRLIYLALAHMIKFRGHFLIEGDLNPDNSDVDKLFIQLVQTYNQLFEENPINASGVDAKAILSARLSKSRRLENLIAQLPGEKKNGLFGNLIALSLGLTPNFKSNFDLAEDAKLQLSKDTYDDDLDNLLAQIGDQYADLFLAAKNLSDAILLSDILRVNTEITKAPLSASMIKRYDEHHQDLTLLKALVRQQLPEKYKEIFFDQSKNGYAGYIDGGASQEEFYKFIKPILEKMDGTEELLVKLNREDLLRKQRTFDNGSIPHQIHLGELHAILRRQEDFYPFLKDNREKIEKILTFRIPYYVGPLARGNSRFAWMTRKSEETITPWNFEEVVDKGASAQSFIERMTNFDKNLPNEKVLPKHSLLYEYFTVYNELTKVKYVTEGMRKPAFLSGEQKKAIVDLLFKTNRKVTVKQLKEDYFKKIECFDSVEISGVEDRFNASLGTYHDLLKIIKDKDFLDNEENEDILEDIVLTLTLFEDREMIEERLKTYAHLFDDKVMKQLKRRRYTGWGRLSRKLINGIRDKQSGKTILDFLKSDGFANRNFMQLIHDDSLTFKEDIQKAQVSGQGDSLHEHIANLAGSPAIKKGILQTVKVVDELVKVMGRHKPENIVIEMARENQTTQKGQKNSRERMKRIEEGIKELGSQILKEHPVENTQLQNEKLYLYYLQNGRDMYVDQELDINRLSDYDVDHIVPQSFLKDDSIDNKVLTRSDKNRGKSDNVPSEEVVKKMKNYWRQLLNAKLITQRKFDNLTKAERGGLSELDKAGFIKRQLVETRQITKHVAQILDSRMNTKYDENDKLIREVKVITLKSKLVSDFRKDFQFYKVREINNYHHAHDAYLNAVVGTALIKKYPKLESEFVYGDYKVYDVRKMIAKSEQEIGKATAKYFFYSNIMNFFKTEITLANGEIRKRPLIETNGETGEIVWDKGRDFATVRKVLSMPQVNIVKKTEVQTGGFSKESILPKRNSDKLIARKKDWDPKKYGGFDSPTVAYSVLVVAKVEKGKSKKLKSVKELLGITIMERSSFEKNPIDFLEAKGYKEVKKDLIIKLPKYSLFELENGRKRMLASAGELQKGNELALPSKYVNFLYLASHYEKLKGSPEDNEQKQLFVEQHKHYLDEIIEQISEFSKRVILADANLDKVLSAYNKHRDKPIREQAENIIHLFTLTNLGAPAAFKYFDTTIDRKRYTSTKEVLDATLIHQSITGLYETRIDLSQLGGDEGADKRTADGSEFESPKKKRKV

SEQ ID NO: 339 - protein, 1588 aa, synthetic construct
  REGION 1..1588: note = ABE8.20-m polypeptide sequence
  REGION 1..167: note = MISC_FEATURE - Adenosine deaminase sequence
  REGION 168..199: note = MISC_FEATURE - Linker sequence
  REGION 200..1566: note = MISC_FEATURE - Sequence derived from Cas9
  REGION 1567..1588: note = MISC_FEATURE - Bipartite nuclear localization sequence
MSEVEFSHEYWMRHALTLAKRARDEREVPVGAVLVLNNRVIGEGWNRAIGLHDPTAHAEIMALRQGGLVMQNYRLYDATLYSTFEPCVMCAGAMIHSRIGRVVFGVRNAKTGAAGSLMDVLHHPGMNHRVEITEGILADECAALLCRFFRMPRRVFNAQKKAQSSTDSGGSSGGSSGSETPGTSESATPESSGGSSGGSDKKYSIGLAIGTNSVGWAVITDEYKVPSKKFKVLGNTDRHSIKKNLIGALLFDSGETAEATRLKRTARRRYTRRKNRICYLQEIFSNEMAKVDDSFFHRLEESFLVEEDKKHERHPIFGNIVDEVAYHEKYPTIYHLRKKLVDSTDKADLRLIYLALAHMIKFRGHFLIEGDLNPDNSDVDKLFIQLVQTYNQLFEENPINASGVDAKAILSARLSKSRRLENLIAQLPGEKKNGLFGNLIALSLGLTPNFKSNFDLAEDAKLQLSKDTYDDDLDNLLAQIGDQYADLFLAAKNLSDAILLSDILRVNTEITKAPLSASMIKRYDEHHQDLTLLKALVRQQLPEKYKEIFFDQSKNGYAGYIDGGASQEEFYKFIKPILEKMDGTEELLVKLNREDLLRKQRTFDNGSIPHQIHLGELHAILRRQEDFYPFLKDNREKIEKILTFRIPYYVGPLARGNSRFAWMTRKSEETITPWNFEEVVDKGASAQSFIERMTNFDKNLPNEKVLPKHSLLYEYFTVYNELTKVKYVTEGMRKPAFLSGEQKKAIVDLLFKTNRKVTVKQLKEDYFKKIECFDSVEISGVEDRFNASLGTYHDLLKIIKDKDFLDNEENEDILEDIVLTLTLFEDREMIEERLKTYAHLFDDKVMKQLKRRRYTGWGRLSRKLINGIRDKQSGKTILDFLKSDGFANRNFMQLIHDDSLTFKEDIQKAQVSGQGDSLHEHIANLAGSPAIKKGILQTVKVVDELVKVMGRHKPENIVIEMARENQTTQKGQKNSRERMKRIEEGIKELGSQILKEHPVENTQLQNEKLYLYYLQNGRDMYVDQELDINRLSDYDVDHIVPQSFLKDDSIDNKVLTRSDKNRGKSDNVPSEEVVKKMKNYWRQLLNAKLITQRKFDNLTKAERGGLSELDKAGFIKRQLVETRQITKHVAQILDSRMNTKYDENDKLIREVKVITLKSKLVSDFRKDFQFYKVREINNYHHAHDAYLNAVVGTALIKKYPKLESEFVYGDYKVYDVRKMIAKSEQEIGKATAKYFFYSNIMNFFKTEITLANGEIRKRPLIETNGETGEIVWDKGRDFATVRKVLSMPQVNIVKKTEVQTGGFSKESILPKRNSDKLIARKKDWDPKKYGGFDSPTVAYSVLVVAKVEKGKSKKLKSVKELLGITIMERSSFEKNPIDFLEAKGYKEVKKDLIIKLPKYSLFELENGRKRMLASAGELQKGNELALPSKYVNFLYLASHYEKLKGSPEDNEQKQLFVEQHKHYLDEIIEQISEFSKRVILADANLDKVLSAYNKHRDKPIREQAENIIHLFTLTNLGAPAAFKYFDTTIDRKRYTSTKEVLDATLIHQSITGLYETRIDLSQLGGDEGADKRTADGSEFESPKKKRKV

SEQ ID NO: 340 - protein, 1786 aa, synthetic construct
  REGION 1..1786: note = ABE8.20-d polypeptide sequence
  REGION 1..167: note = MISC_FEATURE - Adenosine deaminase sequence
  REGION 168..199: note = MISC_FEATURE - Linker sequence
  REGION 200..365: note = MISC_FEATURE - Adenosine deaminase sequence
  REGION 366..397: note = MISC_FEATURE - Linker sequence
  REGION 398..1764: note = MISC_FEATURE - Sequence derived from Cas9
  REGION 1765..1786: note = MISC_FEATURE - Bipartite nuclear localization sequence
MSEVEFSHEYWMRHALTLAKRAWDEREVPVGAVLVHNNRVIGEGWNRPIGRHDPTAHAEIMALRQGGLVMQNYRLIDATLYVTLEPCVMCAGAMIHSRIGRVVFGARDAKTGAAGSLMDVLHHPGMNHRVEITEGILADECAALLSDFFRMRRQEIKAQKKAQSSTDSGGSSGGSSGSETPGTSESATPESSGGSSGGSSEVEFSHEYWMRHALTLAKRARDEREVPVGAVLVLNNRVIGEGWNRAIGLHDPTAHAEIMALRQGGLVMQNYRLYDATLYSTFEPCVMCAGAMIHSRIGRVVFGVRNAKTGAAGSLMDVLHHPGMNHRVEITEGILADECAALLCRFFRMPRRVFNAQKKAQSSTDSGGSSGGSSGSETPGTSESATPESSGGSSGGSDKKYSIGLAIGTNSVGWAVITDEYKVPSKKFKVLGNTDRHSIKKNLIGALLFDSGETAEATRLKRTARRRYTRRKNRICYLQEIFSNEMAKVDDSFFHRLEESFLVEEDKKHERHPIFGNIVDEVAYHEKYPTIYHLRKKLVDSTDKADLRLIYLALAHMIKFRGHFLIEGDLNPDNSDVDKLFIQLVQTYNQLFEENPINASGVDAKAILSARLSKSRRLENLIAQLPGEKKNGLFGNLIALSLGLTPNFKSNFDLAEDAKLQLSKDTYDDDLDNLLAQIGDQYADLFLAAKNLSDAILLSDILRVNTEITKAPLSASMIKRYDEHHQDLTLLKALVRQQLPEKYKEIFFDQSKNGYAGYIDGGASQEEFYKFIKPILEKMDGTEELLVKLNREDLLRKQRTFDNGSIPHQIHLGELHAILRRQEDFYPFLKDNREKIEKILTFRIPYYVGPLARGNSRFAWMTRKSEETITPWNFEEVVDKGASAQSFIERMTNFDKNLPNEKVLPKHSLLYEYFTVYNELTKVKYVTEGMRKPAFLSGEQKKAIVDLLFKTNRKVTVKQLKEDYFKKIECFDSVEISGVEDRFNASLGTYHDLLKIIKDKDFLDNEENEDILEDIVLTLTLFEDREMIEERLKTYAHLFDDKVMKQLKRRRYTGWGRLSRKLINGIRDKQSGKTILDFLKSDGFANRNFMQLIHDDSLTFKEDIQKAQVSGQGDSLHEHIANLAGSPAIKKGILQTVKVVDELVKVMGRHKPENIVIEMARENQTTQKGQKNSRERMKRIEEGIKELGSQILKEHPVENTQLQNEKLYLYYLQNGRDMYVDQELDINRLSDYDVDHIVPQSFLKDDSIDNKVLTRSDKNRGKSDNVPSEEVVKKMKNYWRQLLNAKLITQRKFDNLTKAERGGLSELDKAGFIKRQLVETRQITKHVAQILDSRMNTKYDENDKLIREVKVITLKSKLVSDFRKDFQFYKVREINNYHHAHDAYLNAVVGTALIKKYPKLESEFVYGDYKVYDVRKMIAKSEQEIGKATAKYFFYSNIMNFFKTEITLANGEIRKRPLIETNGETGEIVWDKGRDFATVRKVLSMPQVNIVKKTEVQTGGFSKESILPKRNSDKLIARKKDWDPKKYGGFDSPTVAYSVLVVAKVEKGKSKKLKSVKELLGITIMERSSFEKNPIDFLEAKGYKEVKKDLIIKLPKYSLFELENGRKRMLASAGELQKGNELALPSKYVNFLYLASHYEKLKGSPEDNEQKQLFVEQHKHYLDEIIEQISEFSKRVILADANLDKVLSAYNKHRDKPIREQAENIIHLFTLTNLGAPAAFKYFDTTIDRKRYTSTKEVLDATLIHQSITGLYETRIDLSQLGGDEGADKRTADGSEFESPKKKRKV

SEQ ID NO: 341 - protein, 1588 aa, synthetic construct
  REGION 1..1588: note = 01. monoABE8.1_bpNLS + Y147T polypeptide sequence
MSEVEFSHEYWMRHALTLAKRARDEREVPVGAVLVLNNRVIGEGWNRAIGLHDPTAHAEIMALRQGGLVMQNYRLIDATLYVTFEPCVMCAGAMIHSRIGRVVFGVRNAKTGAAGSLMDVLHYPGMNHRVEITEGILADECAALLCTFFRMPRQVFNAQKKAQSSTDSGGSSGGSSGSETPGTSESATPESSGGSSGGSDKKYSIGLAIGTNSVGWAVITDEYKVPSKKFKVLGNTDRHSIKKNLIGALLFDSGETAEATRLKRTARRRYTRRKNRICYLQEIFSNEMAKVDDSFFHRLEESFLVEEDKKHERHPIFGNIVDEVAYHEKYPTIYHLRKKLVDSTDKADLRLIYLALAHMIKFRGHFLIEGDLNPDNSDVDKLFIQLVQTYNQLFEENPINASGVDAKAILSARLSKSRRLENLIAQLPGEKKNGLFGNLIALSLGLTPNFKSNFDLAEDAKLQLSKDTYDDDLDNLLAQIGDQYADLFLAAKNLSDAILLSDILRVNTEITKAPLSASMIKRYDEHHQDLTLLKALVRQQLPEKYKEIFFDQSKNGYAGYIDGGASQEEFYKFIKPILEKMDGTEELLVKLNREDLLRKQRTFDNGSIPHQIHLGELHAILRRQEDFYPFLKDNREKIEKILTFRIPYYVGPLARGNSRFAWMTRKSEETITPWNFEEVVDKGASAQSFIERMTNFDKNLPNEKVLPKHSLLYEYFTVYNELTKVKYVTEGMRKPAFLSGEQKKAIVDLLFKTNRKVTVKQLKEDYFKKIECFDSVEISGVEDRFNASLGTYHDLLKIIKDKDFLDNEENEDILEDIVLTLTLFEDREMIEERLKTYAHLFDDKVMKQLKRRRYTGWGRLSRKLINGIRDKQSGKTILDFLKSDGFANRNFMQLIHDDSLTFKEDIQKAQVSGQGDSLHEHIANLAGSPAIKKGILQTVKVVDELVKVMGRHKPENIVIEMARENQTTQKGQKNSRERMKRIEEGIKELGSQILKEHPVENTQLQNEKLYLYYLQNGRDMYVDQELDINRLSDYDVDHIVPQSFLKDDSIDNKVLTRSDKNRGKSDNVPSEEVVKKMKNYWRQLLNAKLITQRKFDNLTKAERGGLSELDKAGFIKRQLVETRQITKHVAQILDSRMNTKYDENDKLIREVKVITLKSKLVSDFRKDFQFYKVREINNYHHAHDAYLNAVVGTALIKKYPKLESEFVYGDYKVYDVRKMIAKSEQEIGKATAKYFFYSNIMNFFKTEITLANGEIRKRPLIETNGETGEIVWDKGRDFATVRKVLSMPQVNIVKKTEVQTGGFSKESILPKRNSDKLIARKKDWDPKKYGGFVSPTVAYSVLVVAKVEKGKSKKLKSVKELLGITIMERSSFEKNPIDFLEAKGYKEVKKDLIIKLPKYSLFELENGRKRMLASARELQKGNELALPSKYVNFLYLASHYEKLKGSPEDNEQKQLFVEQHKHYLDEIIEQISEFSKRVILADANLDKVLSAYNKHRDKPIREQAENIIHLFTLTNLGAPAAFKYFDTTIDRKQYRSTKEVLDATLIHQSITGLYETRIDLSQLGGDEGADKRTADGSEFESPKKKRKV

SEQ ID NO: 342 - protein, 1588 aa, synthetic construct
  REGION 1..1588: note = 02. monoABE8.1_bpNLS + Y147R polypeptide sequence
MSEVEFSHEYWMRHALTLAKRARDEREVPVGAVLVLNNRVIGEGWNRAIGLHDPTAHAEIMALRQGGLVMQNYRLIDATLYVTFEPCVMCAGAMIHSRIGRVVFGVRNAKTGAAGSLMDVLHYPGMNHRVEITEGILADECAALLCRFFRMPRQVFNAQKKAQSSTDSGGSSGGSSGSETPGTSESATPESSGGSSGGSDKKYSIGLAIGTNSVGWAVITDEYKVPSKKFKVLGNTDRHSIKKNLIGALLFDSGETAEATRLKRTARRRYTRRKNRICYLQEIFSNEMAKVDDSFFHRLEESFLVEEDKKHERHPIFGNIVDEVAYHEKYPTIYHLRKKLVDSTDKADLRLIYLALAHMIKFRGHFLIEGDLNPDNSDVDKLFIQLVQTYNQLFEENPINASGVDAKAILSARLSKSRRLENLIAQLPGEKKNGLFGNLIALSLGLTPNFKSNFDLAEDAKLQLSKDTYDDDLDNLLAQIGDQYADLFLAAKNLSDAILLSDILRVNTEITKAPLSASMIKRYDEHHQDLTLLKALVRQQLPEKYKEIFFDQSKNGYAGYIDGGASQEEFYKFIKPILEKMDGTEELLVKLNREDLLRKQRTFDNGSIPHQIHLGELHAILRRQEDFYPFLKDNREKIEKILTFRIPYYVGPLARGNSRFAWMTRKSEETITPWNFEEVVDKGASAQSFIERMTNFDKNLPNEKVLPKHSLLYEYFTVYNELTKVKYVTEGMRKPAFLSGEQKKAIVDLLFKTNRKVTVKQLKEDYFKKIECFDSVEISGVEDRFNASLGTYHDLLKIIKDKDFLDNEENEDILEDIVLTLTLFEDREMIEERLKTYAHLFDDKVMKQLKRRRYTGWGRLSRKLINGIRDKQSGKTILDFLKSDGFANRNFMQLIHDDSLTFKEDIQKAQVSGQGDSLHEHIANLAGSPAIKKGILQTVKVVDELVKVMGRHKPENIVIEMARENQTTQKGQKNSRERMKRIEEGIKELGSQILKEHPVENTQLQNEKLYLYYLQNGRDMYVDQELDINRLSDYDVDHIVPQSFLKDDSIDNKVLTRSDKNRGKSDNVPSEEVVKKMKNYWRQLLNAKLITQRKFDNLTKAERGGLSELDKAGFIKRQLVETRQITKHVAQILDSRMNTKYDENDKLIREVKVITLKSKLVSDFRKDFQFYKVREINNYHHAHDAYLNAVVGTALIKKYPKLESEFVYGDYKVYDVRKMIAKSEQEIGKATAKYFFYSNIMNFFKTEITLANGEIRKRPLIETNGETGEIVWDKGRDFATVRKVLSMPQVNIVKKTEVQTGGFSKESILPKRNSDKLIARKKDWDPKKYGGFVSPTVAYSVLVVAKVEKGKSKKLKSVKELLGITIMERSSFEKNPIDFLEAKGYKEVKKDLIIKLPKYSLFELENGRKRMLASARELQKGNELALPSKYVNFLYLASHYEKLKGSPEDNEQKQLFVEQHKHYLDEIIEQISEFSKRVILADANLDKVLSAYNKHRDKPIREQAENIIHLFTLTNLGAPAAFKYFDTTIDRKQYRSTKEVLDATLIHQSITGLYETRIDLSQLGGDEGADKRTADGSEFESPKKKRKV

SEQ ID NO: 343 - protein, 1588 aa, synthetic construct
  REGION 1..1588: note = 03. monoABE8.1_bpNLS + Q154S polypeptide sequence
MSEVEFSHEYWMRHALTLAKRARDEREVPVGAVLVLNNRVIGEGWNRAIGLHDPTAHAEIMALRQGGLVMQNYRLIDATLYVTFEPCVMCAGAMIHSRIGRVVFGVRNAKTGAAGSLMDVLHYPGMNHRVEITEGILADECAALLCYFFRMPRSVFNAQKKAQSSTDSGGSSGGSSGSETPGTSESATPESSGGSSGGSDKKYSIGLAIGTNSVGWAVITDEYKVPSKKFKVLGNTDRHSIKKNLIGALLFDSGETAEATRLKRTARRRYTRRKNRICYLQEIFSNEMAKVDDSFFHRLEESFLVEEDKKHERHPIFGNIVDEVAYHEKYPTIYHLRKKLVDSTDKADLRLIYLALAHMIKFRGHFLIEGDLNPDNSDVDKLFIQLVQTYNQLFEENPINASGVDAKAILSARLSKSRRLENLIAQLPGEKKNGLFGNLIALSLGLTPNFKSNFDLAEDAKLQLSKDTYDDDLDNLLAQIGDQYADLFLAAKNLSDAILLSDILRVNTEITKAPLSASMIKRYDEHHQDLTLLKALVRQQLPEKYKEIFFDQSKNGYAGYIDGGASQEEFYKFIKPILEKMDGTEELLVKLNREDLLRKQRTFDNGSIPHQIHLGELHAILRRQEDFYPFLKDNREKIEKILTFRIPYYVGPLARGNSRFAWMTRKSEETITPWNFEEVVDKGASAQSFIERMTNFDKNLPNEKVLPKHSLLYEYFTVYNELTKVKYVTEGMRKPAFLSGEQKKAIVDLLFKTNRKVTVKQLKEDYFKKIECFDSVEISGVEDRFNASLGTYHDLLKIIKDKDFLDNEENEDILEDIVLTLTLFEDREMIEERLKTYAHLFDDKVMKQLKRRRYTGWGRLSRKLINGIRDKQSGKTILDFLKSDGFANRNFMQLIHDDSLTFKEDIQKAQVSGQGDSLHEHIANLAGSPAIKKGILQTVKVVDELVKVMGRHKPENIVIEMARENQTTQKGQKNSRERMKRIEEGIKELGSQILKEHPVENTQLQNEKLYLYYLQNGRDMYVDQELDINRLSDYDVDHIVPQSFLKDDSIDNKVLTRSDKNRGKSDNVPSEEVVKKMKNYWRQLLNAKLITQRKFDNLTKAERGGLSELDKAGFIKRQLVETRQITKHVAQILDSRMNTKYDENDKLIREVKVITLKSKLVSDFRKDFQFYKVREINNYHHAHDAYLNAVVGTALIKKYPKLESEFVYGDYKVYDVRKMIAKSEQEIGKATAKYFFYSNIMNFFKTEITLANGEIRKRPLIETNGETGEIVWDKGRDFATVRKVLSMPQVNIVKKTEVQTGGFSKESILPKRNSDKLIARKKDWDPKKYGGFVSPTVAYSVLVVAKVEKGKSKKLKSVKELLGITIMERSSFEKNPIDFLEAKGYKEVKKDLIIKLPKYSLFELENGRKRMLASARELQKGNELALPSKYVNFLYLASHYEKLKGSPEDNEQKQLFVEQHKHYLDEIIEQISEFSKRVILADANLDKVLSAYNKHRDKPIREQAENIIHLFTLTNLGAPAAFKYFDTTIDRKQYRSTKEVLDATLIHQSITGLYETRIDLSQLGGDEGADKRTADGSEFESPKKKRKV

SEQ ID NO: 344 - protein, 1588 aa, synthetic construct
  REGION 1..1588: note = 04. monoABE8.1_bpNLS + Y123H polypeptide sequence
MSEVEFSHEYWMRHALTLAKRARDEREVPVGAVLVLNNRVIGEGWNRAIGLHDPTAHAEIMALRQGGLVMQNYRLIDATLYVTFEPCVMCAGAMIHSRIGRVVFGVRNAKTGAAGSLMDVLHHPGMNHRVEITEGILADECAALLCYFFRMPRQVFNAQKKAQSSTDSGGSSGGSSGSETPGTSESATPESSGGSSGGSDKKYSIGLAIGTNSVGWAVITDEYKVPSKKFKVLGNTDRHSIKKNLIGALLFDSGETAEATRLKRTARRRYTRRKNRICYLQEIFSNEMAKVDDSFFHRLEESFLVEEDKKHERHPIFGNIVDEVAYHEKYPTIYHLRKKLVDSTDKADLRLIYLALAHMIKFRGHFLIEGDLNPDNSDVDKLFIQLVQTYNQLFEENPINASGVDAKAILSARLSKSRRLENLIAQLPGEKKNGLFGNLIALSLGLTPNFKSNFDLAEDAKLQLSKDTYDDDLDNLLAQIGDQYADLFLAAKNLSDAILLSDILRVNTEITKAPLSASMIKRYDEHHQDLTLLKALVRQQLPEKYKEIFFDQSKNGYAGYIDGGASQEEFYKFIKPILEKMDGTEELLVKLNREDLLRKQRTFDNGSIPHQIHLGELHAILRRQEDFYPFLKDNREKIEKILTFRIPYYVGPLARGNSRFAWMTRKSEETITPWNFEEVVDKGASAQSFIERMTNFDKNLPNEKVLPKHSLLYEYFTVYNELTKVKYVTEGMRKPAFLSGEQKKAIVDLLFKTNRKVTVKQLKEDYFKKIECFDSVEISGVEDRFNASLGTYHDLLKIIKDKDFLDNEENEDILEDIVLTLTLFEDREMIEERLKTYAHLFDDKVMKQLKRRRYTGWGRLSRKLINGIRDKQSGKTILDFLKSDGFANRNFMQLIHDDSLTFKEDIQKAQVSGQGDSLHEHIANLAGSPAIKKGILQTVKVVDELVKVMGRHKPENIVIEMARENQTTQKGQKNSRERMKRIEEGIKELGSQILKEHPVENTQLQNEKLYLYYLQNGRDMYVDQELDINRLSDYDVDHIVPQSFLKDDSIDNKVLTRSDKNRGKSDNVPSEEVVKKMKNYWRQLLNAKLITQRKFDNLTKAERGGLSELDKAGFIKRQLVETRQITKHVAQILDSRMNTKYDENDKLIREVKVITLKSKLVSDFRKDFQFYKVREINNYHHAHDAYLNAVVGTALIKKYPKLESEFVYGDYKVYDVRKMIAKSEQEIGKATAKYFFYSNIMNFFKTEITLANGEIRKRPLIETNGETGEIVWDKGRDFATVRKVLSMPQVNIVKKTEVQTGGFSKESILPKRNSDKLIARKKDWDPKKYGGFVSPTVAYSVLVVAKVEKGKSKKLKSVKELLGITIMERSSFEKNPIDFLEAKGYKEVKKDLIIKLPKYSLFELENGRKRMLASARELQKGNELALPSKYVNFLYLASHYEKLKGSPEDNEQKQLFVEQHKHYLDEIIEQISEFSKRVILADANLDKVLSAYNKHRDKPIREQAENIIHLFTLTNLGAPAAFKYFDTTIDRKQYRSTKEVLDATLIHQSITGLYETRIDLSQLGGDEGADKRTADGSEFESPKKKRKV

SEQ ID NO: 345 - protein, 1588 aa, synthetic construct
  REGION 1..1588: note = 05. monoABE8.1_bpNLS + V82S polypeptide sequence
MSEVEFSHEYWMRHALTLAKRARDEREVPVGAVLVLNNRVIGEGWNRAIGLHDPTAHAEIMALRQGGLVMQNYRLIDATLYSTFEPCVMCAGAMIHSRIGRVVFGVRNAKTGAAGSLMDVLHYPGMNHRVEITEGILADECAALLCYFFRMPRQVFNAQKKAQSSTDSGGSSGGSSGSETPGTSESATPESSGGSSGGSDKKYSIGLAIGTNSVGWAVITDEYKVPSKKFKVLGNTDRHSIKKNLIGALLFDSGETAEATRLKRTARRRYTRRKNRICYLQEIFSNEMAKVDDSFFHRLEESFLVEEDKKHERHPIFGNIVDEVAYHEKYPTIYHLRKKLVDSTDKADLRLIYLALAHMIKFRGHFLIEGDLNPDNSDVDKLFIQLVQTYNQLFEENPINASGVDAKAILSARLSKSRRLENLIAQLPGEKKNGLFGNLIALSLGLTPNFKSNFDLAEDAKLQLSKDTYDDDLDNLLAQIGDQYADLFLAAKNLSDAILLSDILRVNTEITKAPLSASMIKRYDEHHQDLTLLKALVRQQLPEKYKEIFFDQSKNGYAGYIDGGASQEEFYKFIKPILEKMDGTEELLVKLNREDLLRKQRTFDNGSIPHQIHLGELHAILRRQEDFYPFLKDNREKIEKILTFRIPYYVGPLARGNSRFAWMTRKSEETITPWNFEEVVDKGASAQSFIERMTNFDKNLPNEKVLPKHSLLYEYFTVYNELTKVKYVTEGMRKPAFLSGEQKKAIVDLLFKTNRKVTVKQLKEDYFKKIECFDSVEISGVEDRFNASLGTYHDLLKIIKDKDFLDNEENEDILEDIVLTLTLFEDREMIEERLKTYAHLFDDKVMKQLKRRRYTGWGRLSRKLINGIRDKQSGKTILDFLKSDGFANRNFMQLIHDDSLTFKEDIQKAQVSGQGDSLHEHIANLAGSPAIKKGILQTVKVVDELVKVMGRHKPENIVIEMARENQTTQKGQKNSRERMKRIEEGIKELGSQILKEHPVENTQLQNEKLYLYYLQNGRDMYVDQELDINRLSDYDVDHIVPQSFLKDDSIDNKVLTRSDKNRGKSDNVPSEEVVKKMKNYWRQLLNAKLITQRKFDNLTKAERGGLSELDKAGFIKRQLVETRQITKHVAQILDSRMNTKYDENDKLIREVKVITLKSKLVSDFRKDFQFYKVREINNYHHAHDAYLNAVVGTALIKKYPKLESEFVYGDYKVYDVRKMIAKSEQEIGKATAKYFFYSNIMNFFKTEITLANGEIRKRPLIETNGETGEIVWDKGRDFATVRKVLSMPQVNIVKKTEVQTGGFSKESILPKRNSDKLIARKKDWDPKKYGGFVSPTVAYSVLVVAKVEKGKSKKLKSVKELLGITIMERSSFEKNPIDFLEAKGYKEVKKDLIIKLPKYSLFELENGRKRMLASARELQKGNELALPSKYVNFLYLASHYEKLKGSPEDNEQKQLFVEQHKHYLDEIIEQISEFSKRVILADANLDKVLSAYNKHRDKPIREQAENIIHLFTLTNLGAPAAFKYFDTTIDRKQYRSTKEVLDATLIHQSITGLYETRIDLSQLGGDEGADKRTADGSEFESPKKKRKV

SEQ ID NO: 346 - protein, 1588 aa, synthetic construct
  REGION 1..1588: note = 06. monoABE8.1_bpNLS + T166R polypeptide sequence
MSEVEFSHEYWMRHALTLAKRARDEREVPVGAVLVLNNRVIGEGWNRAIGLHDPTAHAEIMALRQGGLVMQNYRLIDATLYVTFEPCVMCAGAMIHSRIGRVVFGVRNAKTGAAGSLMDVLHYPGMNHRVEITEGILADECAALLCYFFRMPRQVFNAQKKAQSSRDSGGSSGGSSGSETPGTSESATPESSGGSSGGSDKKYSIGLAIGTNSVGWAVITDEYKVPSKKFKVLGNTDRHSIKKNLIGALLFDSGETAEATRLKRTARRRYTRRKNRICYLQEIFSNEMAKVDDSFFHRLEESFLVEEDKKHERHPIFGNIVDEVAYHEKYPTIYHLRKKLVDSTDKADLRLIYLALAHMIKFRGHFLIEGDLNPDNSDVDKLFIQLVQTYNQLFEENPINASGVDAKAILSARLSKSRRLENLIAQLPGEKKNGLFGNLIALSLGLTPNFKSNFDLAEDAKLQLSKDTYDDDLDNLLAQIGDQYADLFLAAKNLSDAILLSDILRVNTEITKAPLSASMIKRYDEHHQDLTLLKALVRQQLPEKYKEIFFDQSKNGYAGYIDGGASQEEFYKFIKPILEKMDGTEELLVKLNREDLLRKQRTFDNGSIPHQIHLGELHAILRRQEDFYPFLKDNREKIEKILTFRIPYYVGPLARGNSRFAWMTRKSEETITPWNFEEVVDKGASAQSFIERMTNFDKNLPNEKVLPKHSLLYEYFTVYNELTKVKYVTEGMRKPAFLSGEQKKAIVDLLFKTNRKVTVKQLKEDYFKKIECFDSVEISGVEDRFNASLGTYHDLLKIIKDKDFLDNEENEDILEDIVLTLTLFEDREMIEERLKTYAHLFDDKVMKQLKRRRYTGWGRLSRKLINGIRDKQSGKTILDFLKSDGFANRNFMQLIHDDSLTFKEDIQKAQVSGQGDSLHEHIANLAGSPAIKKGILQTVKVVDELVKVMGRHKPENIVIEMARENQTTQKGQKNSRERMKRIEEGIKELGSQILKEHPVENTQLQNEKLYLYYLQNGRDMYVDQELDINRLSDYDVDHIVPQSFLKDDSIDNKVLTRSDKNRGKSDNVPSEEVVKKMKNYWRQLLNAKLITQRKFDNLTKAERGGLSELDKAGFIKRQLVETRQITKHVAQILDSRMNTKYDENDKLIREVKVITLKSKLVSDFRKDFQFYKVREINNYHHAHDAYLNAVVGTALIKKYPKLESEFVYGDYKVYDVRKMIAKSEQEIGKATAKYFFYSNIMNFFKTEITLANGEIRKRPLIETNGETGEIVWDKGRDFATVRKVLSMPQVNIVKKTEVQTGGFSKESILPKRNSDKLIARKKDWDPKKYGGFVSPTVAYSVLVVAKVEKGKSKKLKSVKELLGITIMERSSFEKNPIDFLEAKGYKEVKKDLIIKLPKYSLFELENGRKRMLASARELQKGNELALPSKYVNFLYLASHYEKLKGSPEDNEQKQLFVEQHKHYLDEIIEQISEFSKRVILADANLDKVLSAYNKHRDKPIREQAENIIHLFTLTNLGAPAAFKYFDTTIDRKQYRSTKEVLDATLIHQSITGLYETRIDLSQLGGDEGADKRTADGSEFESPKKKRKV

SEQ ID NO: 347 - protein, 1588 aa, synthetic construct
  REGION 1..1588: note = 07. monoABE8.1_bpNLS + Q154R polypeptide sequence
MSEVEFSHEYWMRHALTLAKRARDEREVPVGAVLVLNNRVIGEGWNRAIGLHDPTAHAEIMALRQGGLVMQNYRLIDATLYVTFEPCVMCAGAMIHSRIGRVVFGVRNAKTGAAGSLMDVLHYPGMNHRVEITEGILADECAALLCYFFRMPRRVFNAQKKAQSSTDSGGSSGGSSGSETPGTSESATPESSGGSSGGSDKKYSIGLAIGTNSVGWAVITDEYKVPSKKFKVLGNTDRHSIKKNLIGALLFDSGETAEATRLKRTARRRYTRRKNRICYLQEIFSNEMAKVDDSFFHRLEESFLVEEDKKHERHPIFGNIVDEVAYHEKYPTIYHLRKKLVDSTDKADLRLIYLALAHMIKFRGHFLIEGDLNPDNSDVDKLFIQLVQTYNQLFEENPINASGVDAKAILSARLSKSRRLENLIAQLPGEKKNGLFGNLIALSLGLTPNFKSNFDLAEDAKLQLSKDTYDDDLDNLLAQIGDQYADLFLAAKNLSDAILLSDILRVNTEITKAPLSASMIKRYDEHHQDLTLLKALVRQQLPEKYKEIFFDQSKNGYAGYIDGGASQEEFYKFIKPILEKMDGTEELLVKLNREDLLRKQRTFDNGSIPHQIHLGELHAILRRQEDFYPFLKDNREKIEKILTFRIPYYVGPLARGNSRFAWMTRKSEETITPWNFEEVVDKGASAQSFIERMTNFDKNLPNEKVLPKHSLLYEYFTVYNELTKVKYVTEGMRKPAFLSGEQKKAIVDLLFKTNRKVTVKQLKEDYFKKIECFDSVEISGVEDRFNASLGTYHDLLKIIKDKDFLDNEENEDILEDIVLTLTLFEDREMIEERLKTYAHLFDDKVMKQLKRRRYTGWGRLSRKLINGIRDKQSGKTILDFLKSDGFANRNFMQLIHDDSLTFKEDIQKAQVSGQGDSLHEHIANLAGSPAIKKGILQTVKVVDELVKVMGRHKPENIVIEMARENQTTQKGQKNSRERMKRIEEGIKELGSQILKEHPVENTQLQNEKLYLYYLQNGRDMYVDQELDINRLSDYDVDHIVPQSFLKDDSIDNKVLTRSDKNRGKSDNVPSEEVVKKMKNYWRQLLNAKLITQRKFDNLTKAERGGLSELDKAGFIKRQLVETRQITKHVAQILDSRMNTKYDENDKLIREVKVITLKSKLVSDFRKDFQFYKVREINNYHHAHDAYLNAVVGTALIKKYPKLESEFVYGDYKVYDVRKMIAKSEQEIGKATAKYFFYSNIMNFFKTEITLANGEIRKRPLIETNGETGEIVWDKGRDFATVRKVLSMPQVNIVKKTEVQTGGFSKESILPKRNSDKLIARKKDWDPKKYGGFVSPTVAYSVLVVAKVEKGKSKKLKSVKELLGITIMERSSFEKNPIDFLEAKGYKEVKKDLIIKLPKYSLFELENGRKRMLASARELQKGNELALPSKYVNFLYLASHYEKLKGSPEDNEQKQLFVEQHKHYLDEIIEQISEFSKRVILADANLDKVLSAYNKHRDKPIREQAENIIHLFTLTNLGAPAAFKYFDTTIDRKQYRSTKEVLDATLIHQSITGLYETRIDLSQLGGDEGADKRTADGSEFESPKKKRKV

SEQ ID NO: 348 - protein, 1588 aa, synthetic construct
  REGION 1..1588: note = 08. monoABE8.1_bpNLS +Y147R_Q154R_Y123H polypeptide sequence
MSEVEFSHEYWMRHALTLAKRARDEREVPVGAVLVLNNRVIGEGWNRAIGLHDPTAHAEIMALRQGGLVMQNYRLIDATLYVTFEPCVMCAGAMIHSRIGRVVFGVRNAKTGAAGSLMDVLHHPGMNHRVEITEGILADECAALLCRFFRMPRRVFNAQKKAQSSTDSGGSSGGSSGSETPGTSESATPESSGGSSGGSDKKYSIGLAIGTNSVGWAVITDEYKVPSKKFKVLGNTDRHSIKKNLIGALLFDSGETAEATRLKRTARRRYTRRKNRICYLQEIFSNEMAKVDDSFFHRLEESFLVEEDKKHERHPIFGNIVDEVAYHEKYPTIYHLRKKLVDSTDKADLRLIYLALAHMIKFRGHFLIEGDLNPDNSDVDKLFIQLVQTYNQLFEENPINASGVDAKAILSARLSKSRRLENLIAQLPGEKKNGLFGNLIALSLGLTPNFKSNFDLAEDAKLQLSKDTYDDDLDNLLAQIGDQYADLFLAAKNLSDAILLSDILRVNTEITKAPLSASMIKRYDEHHQDLTLLKALVRQQLPEKYKEIFFDQSKNGYAGYIDGGASQEEFYKFIKPILEKMDGTEELLVKLNREDLLRKQRTFDNGSIPHQIHLGELHAILRRQEDFYPFLKDNREKIEKILTFRIPYYVGPLARGNSRFAWMTRKSEETITPWNFEEVVDKGASAQSFIERMTNFDKNLPNEKVLPKHSLLYEYFTVYNELTKVKYVTEGMRKPAFLSGEQKKAIVDLLFKTNRKVTVKQLKEDYFKKIECFDSVEISGVEDRFNASLGTYHDLLKIIKDKDFLDNEENEDILEDIVLTLTLFEDREMIEERLKTYAHLFDDKVMKQLKRRRYTGWGRLSRKLINGIRDKQSGKTILDFLKSDGFANRNFMQLIHDDSLTFKEDIQKAQVSGQGDSLHEHIANLAGSPAIKKGILQTVKVVDELVKVMGRHKPENIVIEMARENQTTQKGQKNSRERMKRIEEGIKELGSQILKEHPVENTQLQNEKLYLYYLQNGRDMYVDQELDINRLSDYDVDHIVPQSFLKDDSIDNKVLTRSDKNRGKSDNVPSEEVVKKMKNYWRQLLNAKLITQRKFDNLTKAERGGLSELDKAGFIKRQLVETRQITKHVAQILDSRMNTKYDENDKLIREVKVITLKSKLVSDFRKDFQFYKVREINNYHHAHDAYLNAVVGTALIKKYPKLESEFVYGDYKVYDVRKMIAKSEQEIGKATAKYFFYSNIMNFFKTEITLANGEIRKRPLIETNGETGEIVWDKGRDFATVRKVLSMPQVNIVKKTEVQTGGFSKESILPKRNSDKLIARKKDWDPKKYGGFVSPTVAYSVLVVAKVEKGKSKKLKSVKELLGITIMERSSFEKNPIDFLEAKGYKEVKKDLIIKLPKYSLFELENGRKRMLASARELQKGNELALPSKYVNFLYLASHYEKLKGSPEDNEQKQLFVEQHKHYLDEIIEQISEFSKRVILADANLDKVLSAYNKHRDKPIREQAENIIHLFTLTNLGAPAAFKYFDTTIDRKQYRSTKEVLDATLIHQSITGLYETRIDLSQLGGDEGADKRTADGSEFESPKKKRKV

SEQ ID NO: 349 - protein, 1588 aa, synthetic construct
  REGION 1..1588: note = 09. monoABE8.1_bpNLS +Y147R_Q154R_I76Y polypeptide sequence
MSEVEFSHEYWMRHALTLAKRARDEREVPVGAVLVLNNRVIGEGWNRAIGLHDPTAHAEIMALRQGGLVMQNYRLYDATLYVTFEPCVMCAGAMIHSRIGRVVFGVRNAKTGAAGSLMDVLHYPGMNHRVEITEGILADECAALLCRFFRMPRRVFNAQKKAQSSTDSGGSSGGSSGSETPGTSESATPESSGGSSGGSDKKYSIGLAIGTNSVGWAVITDEYKVPSKKFKVLGNTDRHSIKKNLIGALLFDSGETAEATRLKRTARRRYTRRKNRICYLQEIFSNEMAKVDDSFFHRLEESFLVEEDKKHERHPIFGNIVDEVAYHEKYPTIYHLRKKLVDSTDKADLRLIYLALAHMIKFRGHFLIEGDLNPDNSDVDKLFIQLVQTYNQLFEENPINASGVDAKAILSARLSKSRRLENLIAQLPGEKKNGLFGNLIALSLGLTPNFKSNFDLAEDAKLQLSKDTYDDDLDNLLAQIGDQYADLFLAAKNLSDAILLSDILRVNTEITKAPLSASMIKRYDEHHQDLTLLKALVRQQLPEKYKEIFFDQSKNGYAGYIDGGASQEEFYKFIKPILEKMDGTEELLVKLNREDLLRKQRTFDNGSIPHQIHLGELHAILRRQEDFYPFLKDNREKIEKILTFRIPYYVGPLARGNSRFAWMTRKSEETITPWNFEEVVDKGASAQSFIERMTNFDKNLPNEKVLPKHSLLYEYFTVYNELTKVKYVTEGMRKPAFLSGEQKKAIVDLLFKTNRKVTVKQLKEDYFKKIECFDSVEISGVEDRFNASLGTYHDLLKIIKDKDFLDNEENEDILEDIVLTLTLFEDREMIEERLKTYAHLFDDKVMKQLKRRRYTGWGRLSRKLINGIRDKQSGKTILDFLKSDGFANRNFMQLIHDDSLTFKEDIQKAQVSGQGDSLHEHIANLAGSPAIKKGILQTVKVVDELVKVMGRHKPENIVIEMARENQTTQKGQKNSRERMKRIEEGIKELGSQILKEHPVENTQLQNEKLYLYYLQNGRDMYVDQELDINRLSDYDVDHIVPQSFLKDDSIDNKVLTRSDKNRGKSDNVPSEEVVKKMKNYWRQLLNAKLITQRKFDNLTKAERGGLSELDKAGFIKRQLVETRQITKHVAQILDSRMNTKYDENDKLIREVKVITLKSKLVSDFRKDFQFYKVREINNYHHAHDAYLNAVVGTALIKKYPKLESEFVYGDYKVYDVRKMIAKSEQEIGKATAKYFFYSNIMNFFKTEITLANGEIRKRPLIETNGETGEIVWDKGRDFATVRKVLSMPQVNIVKKTEVQTGGFSKESILPKRNSDKLIARKKDWDPKKYGGFVSPTVAYSVLVVAKVEKGKSKKLKSVKELLGITIMERSSFEKNPIDFLEAKGYKEVKKDLIIKLPKYSLFELENGRKRMLASARELQKGNELALPSKYVNFLYLASHYEKLKGSPEDNEQKQLFVEQHKHYLDEIIEQISEFSKRVILADANLDKVLSAYNKHRDKPIREQAENIIHLFTLTNLGAPAAFKYFDTTIDRKQYRSTKEVLDATLIHQSITGLYETRIDLSQLGGDEGADKRTADGSEFESPKKKRKV

SEQ ID NO: 350 - protein, 1588 aa, synthetic construct
  REGION 1..1588: note = 10. monoABE8.1_bpNLS +Y147R_Q154R_T166R polypeptide sequence
MSEVEFSHEYWMRHALTLAKRARDEREVPVGAVLVLNNRVIGEGWNRAIGLHDPTAHAEIMALRQGGLVMQNYRLIDATLYVTFEPCVMCAGAMIHSRIGRVVFGVRNAKTGAAGSLMDVLHYPGMNHRVEITEGILADECAALLCRFFRMPRRVFNAQKKAQSSRDSGGSSGGSSGSETPGTSESATPESSGGSSGGSDKKYSIGLAIGTNSVGWAVITDEYKVPSKKFKVLGNTDRHSIKKNLIGALLFDSGETAEATRLKRTARRRYTRRKNRICYLQEIFSNEMAKVDDSFFHRLEESFLVEEDKKHERHPIFGNIVDEVAYHEKYPTIYHLRKKLVDSTDKADLRLIYLALAHMIKFRGHFLIEGDLNPDNSDVDKLFIQLVQTYNQLFEENPINASGVDAKAILSARLSKSRRLENLIAQLPGEKKNGLFGNLIALSLGLTPNFKSNFDLAEDAKLQLSKDTYDDDLDNLLAQIGDQYADLFLAAKNLSDAILLSDILRVNTEITKAPLSASMIKRYDEHHQDLTLLKALVRQQLPEKYKEIFFDQSKNGYAGYIDGGASQEEFYKFIKPILEKMDGTEELLVKLNREDLLRKQRTFDNGSIPHQIHLGELHAILRRQEDFYPFLKDNREKIEKILTFRIPYYVGPLARGNSRFAWMTRKSEETITPWNFEEVVDKGASAQSFIERMTNFDKNLPNEKVLPKHSLLYEYFTVYNELTKVKYVTEGMRKPAFLSGEQKKAIVDLLFKTNRKVTVKQLKEDYFKKIECFDSVEISGVEDRFNASLGTYHDLLKIIKDKDFLDNEENEDILEDIVLTLTLFEDREMIEERLKTYAHLFDDKVMKQLKRRRYTGWGRLSRKLINGIRDKQSGKTILDFLKSDGFANRNFMQLIHDDSLTFKEDIQKAQVSGQGDSLHEHIANLAGSPAIKKGILQTVKVVDELVKVMGRHKPENIVIEMARENQTTQKGQKNSRERMKRIEEGIKELGSQILKEHPVENTQLQNEKLYLYYLQNGRDMYVDQELDINRLSDYDVDHIVPQSFLKDDSIDNKVLTRSDKNRGKSDNVPSEEVVKKMKNYWRQLLNAKLITQRKFDNLTKAERGGLSELDKAGFIKRQLVETRQITKHVAQILDSRMNTKYDENDKLIREVKVITLKSKLVSDFRKDFQFYKVREINNYHHAHDAYLNAVVGTALIKKYPKLESEFVYGDYKVYDVRKMIAKSEQEIGKATAKYFFYSNIMNFFKTEITLANGEIRKRPLIETNGETGEIVWDKGRDFATVRKVLSMPQVNIVKKTEVQTGGFSKESILPKRNSDKLIARKKDWDPKKYGGFVSPTVAYSVLVVAKVEKGKSKKLKSVKELLGITIMERSSFEKNPIDFLEAKGYKEVKKDLIIKLPKYSLFELENGRKRMLASARELQKGNELALPSKYVNFLYLASHYEKLKGSPEDNEQKQLFVEQHKHYLDEIIEQISEFSKRVILADANLDKVLSAYNKHRDKPIREQAENIIHLFTLTNLGAPAAFKYFDTTIDRKQYRSTKEVLDATLIHQSITGLYETRIDLSQLGGDEGADKRTADGSEFESPKKKRKV

SEQ ID NO: 351 - protein, 1588 aa, synthetic construct
  REGION 1..1588: note = 11. monoABE8.1_bpNLS +Y147T_Q154R polypeptide sequence
MSEVEFSHEYWMRHALTLAKRARDEREVPVGAVLVLNNRVIGEGWNRAIGLHDPTAHAEIMALRQGGLVMQNYRLIDATLYVTFEPCVMCAGAMIHSRIGRVVFGVRNAKTGAAGSLMDVLHYPGMNHRVEITEGILADECAALLCTFFRMPRRVFNAQKKAQSSTDSGGSSGGSSGSETPGTSESATPESSGGSSGGSDKKYSIGLAIGTNSVGWAVITDEYKVPSKKFKVLGNTDRHSIKKNLIGALLFDSGETAEATRLKRTARRRYTRRKNRICYLQEIFSNEMAKVDDSFFHRLEESFLVEEDKKHERHPIFGNIVDEVAYHEKYPTIYHLRKKLVDSTDKADLRLIYLALAHMIKFRGHFLIEGDLNPDNSDVDKLFIQLVQTYNQLFEENPINASGVDAKAILSARLSKSRRLENLIAQLPGEKKNGLFGNLIALSLGLTPNFKSNFDLAEDAKLQLSKDTYDDDLDNLLAQIGDQYADLFLAAKNLSDAILLSDILRVNTEITKAPLSASMIKRYDEHHQDLTLLKALVRQQLPEKYKEIFFDQSKNGYAGYIDGGASQEEFYKFIKPILEKMDGTEELLVKLNREDLLRKQRTFDNGSIPHQIHLGELHAILRRQEDFYPFLKDNREKIEKILTFRIPYYVGPLARGNSRFAWMTRKSEETITPWNFEEVVDKGASAQSFIERMTNFDKNLPNEKVLPKHSLLYEYFTVYNELTKVKYVTEGMRKPAFLSGEQKKAIVDLLFKTNRKVTVKQLKEDYFKKIECFDSVEISGVEDRFNASLGTYHDLLKIIKDKDFLDNEENEDILEDIVLTLTLFEDREMIEERLKTYAHLFDDKVMKQLKRRRYTGWGRLSRKLINGIRDKQSGKTILDFLKSDGFANRNFMQLIHDDSLTFKEDIQKAQVSGQGDSLHEHIANLAGSPAIKKGILQTVKVVDELVKVMGRHKPENIVIEMARENQTTQKGQKNSRERMKRIEEGIKELGSQILKEHPVENTQLQNEKLYLYYLQNGRDMYVDQELDINRLSDYDVDHIVPQSFLKDDSIDNKVLTRSDKNRGKSDNVPSEEVVKKMKNYWRQLLNAKLITQRKFDNLTKAERGGLSELDKAGFIKRQLVETRQITKHVAQILDSRMNTKYDENDKLIREVKVITLKSKLVSDFRKDFQFYKVREINNYHHAHDAYLNAVVGTALIKKYPKLESEFVYGDYKVYDVRKMIAKSEQEIGKATAKYFFYSNIMNFFKTEITLANGEIRKRPLIETNGETGEIVWDKGRDFATVRKVLSMPQVNIVKKTEVQTGGFSKESILPKRNSDKLIARKKDWDPKKYGGFVSPTVAYSVLVVAKVEKGKSKKLKSVKELLGITIMERSSFEKNPIDFLEAKGYKEVKKDLIIKLPKYSLFELENGRKRMLASARELQKGNELALPSKYVNFLYLASHYEKLKGSPEDNEQKQLFVEQHKHYLDEIIEQISEFSKRVILADANLDKVLSAYNKHRDKPIREQAENIIHLFTLTNLGAPAAFKYFDTTIDRKQYRSTKEVLDATLIHQSITGLYETRIDLSQLGGDEGADKRTADGSEFESPKKKRKV

SEQ ID NO: 352 - protein, 1588 aa, synthetic construct
  REGION 1..1588: note = 12. monoABE8.1_bpNLS +Y147T_Q154S polypeptide sequence
MSEVEFSHEYWMRHALTLAKRARDEREVPVGAVLVLNNRVIGEGWNRAIGLHDPTAHAEIMALRQGGLVMQNYRLIDATLYVTFEPCVMCAGAMIHSRIGRVVFGVRNAKTGAAGSLMDVLHYPGMNHRVEITEGILADECAALLCTFFRMPRSVFNAQKKAQSSTDSGGSSGGSSGSETPGTSESATPESSGGSSGGSDKKYSIGLAIGTNSVGWAVITDEYKVPSKKFKVLGNTDRHSIKKNLIGALLFDSGETAEATRLKRTARRRYTRRKNRICYLQEIFSNEMAKVDDSFFHRLEESFLVEEDKKHERHPIFGNIVDEVAYHEKYPTIYHLRKKLVDSTDKADLRLIYLALAHMIKFRGHFLIEGDLNPDNSDVDKLFIQLVQTYNQLFEENPINASGVDAKAILSARLSKSRRLENLIAQLPGEKKNGLFGNLIALSLGLTPNFKSNFDLAEDAKLQLSKDTYDDDLDNLLAQIGDQYADLFLAAKNLSDAILLSDILRVNTEITKAPLSASMIKRYDEHHQDLTLLKALVRQQLPEKYKEIFFDQSKNGYAGYIDGGASQEEFYKFIKPILEKMDGTEELLVKLNREDLLRKQRTFDNGSIPHQIHLGELHAILRRQEDFYPFLKDNREKIEKILTFRIPYYVGPLARGNSRFAWMTRKSEETITPWNFEEVVDKGASAQSFIERMTNFDKNLPNEKVLPKHSLLYEYFTVYNELTKVKYVTEGMRKPAFLSGEQKKAIVDLLFKTNRKVTVKQLKEDYFKKIECFDSVEISGVEDRFNASLGTYHDLLKIIKDKDFLDNEENEDILEDIVLTLTLFEDREMIEERLKTYAHLFDDKVMKQLKRRRYTGWGRLSRKLINGIRDKQSGKTILDFLKSDGFANRNFMQLIHDDSLTFKEDIQKAQVSGQGDSLHEHIANLAGSPAIKKGILQTVKVVDELVKVMGRHKPENIVIEMARENQTTQKGQKNSRERMKRIEEGIKELGSQILKEHPVENTQLQNEKLYLYYLQNGRDMYVDQELDINRLSDYDVDHIVPQSFLKDDSIDNKVLTRSDKNRGKSDNVPSEEVVKKMKNYWRQLLNAKLITQRKFDNLTKAERGGLSELDKAGFIKRQLVETRQITKHVAQILDSRMNTKYDENDKLIREVKVITLKSKLVSDFRKDFQFYKVREINNYHHAHDAYLNAVVGTALIKKYPKLESEFVYGDYKVYDVRKMIAKSEQEIGKATAKYFFYSNIMNFFKTEITLANGEIRKRPLIETNGETGEIVWDKGRDFATVRKVLSMPQVNIVKKTEVQTGGFSKESILPKRNSDKLIARKKDWDPKKYGGFVSPTVAYSVLVVAKVEKGKSKKLKSVKELLGITIMERSSFEKNPIDFLEAKGYKEVKKDLIIKLPKYSLFELENGRKRMLASARELQKGNELALPSKYVNFLYLASHYEKLKGSPEDNEQKQLFVEQHKHYLDEIIEQISEFSKRVILADANLDKVLSAYNKHRDKPIREQAENIIHLFTLTNLGAPAAFKYFDTTIDRKQYRSTKEVLDATLIHQSITGLYETRIDLSQLGGDEGADKRTADGSEFESPKKKRKV

SEQ ID NO: 353 - protein, 1588 aa, synthetic construct
  REGION 1..1588: note = 13. monoABE8.1_bpNLS +H123Y123H_Y147R_Q154R_I76Y polypeptide sequence
MSEVEFSHEYWMRHALTLAKRARDEREVPVGAVLVLNNRVIGEGWNRAIGLHDPTAHAEIMALRQGGLVMQNYRLYDATLYVTFEPCVMCAGAMIHSRIGRVVFGVRNAKTGAAGSLMDVLHHPGMNHRVEITEGILADECAALLCRFFRMPRRVFNAQKKAQSSTDSGGSSGGSSGSETPGTSESATPESSGGSSGGSDKKYSIGLAIGTNSVGWAVITDEYKVPSKKFKVLGNTDRHSIKKNLIGALLFDSGETAEATRLKRTARRRYTRRKNRICYLQEIFSNEMAKVDDSFFHRLEESFLVEEDKKHERHPIFGNIVDEVAYHEKYPTIYHLRKKLVDSTDKADLRLIYLALAHMIKFRGHFLIEGDLNPDNSDVDKLFIQLVQTYNQLFEENPINASGVDAKAILSARLSKSRRLENLIAQLPGEKKNGLFGNLIALSLGLTPNFKSNFDLAEDAKLQLSKDTYDDDLDNLLAQIGDQYADLFLAAKNLSDAILLSDILRVNTEITKAPLSASMIKRYDEHHQDLTLLKALVRQQLPEKYKEIFFDQSKNGYAGYIDGGASQEEFYKFIKPILEKMDGTEELLVKLNREDLLRKQRTFDNGSIPHQIHLGELHAILRRQEDFYPFLKDNREKIEKILTFRIPYYVGPLARGNSRFAWMTRKSEETITPWNFEEVVDKGASAQSFIERMTNFDKNLPNEKVLPKHSLLYEYFTVYNELTKVKYVTEGMRKPAFLSGEQKKAIVDLLFKTNRKVTVKQLKEDYFKKIECFDSVEISGVEDRFNASLGTYHDLLKIIKDKDFLDNEENEDILEDIVLTLTLFEDREMIEERLKTYAHLFDDKVMKQLKRRRYTGWGRLSRKLINGIRDKQSGKTILDFLKSDGFANRNFMQLIHDDSLTFKEDIQKAQVSGQGDSLHEHIANLAGSPAIKKGILQTVKVVDELVKVMGRHKPENIVIEMARENQTTQKGQKNSRERMKRIEEGIKELGSQILKEHPVENTQLQNEKLYLYYLQNGRDMYVDQELDINRLSDYDVDHIVPQSFLKDDSIDNKVLTRSDKNRGKSDNVPSEEVVKKMKNYWRQLLNAKLITQRKFDNLTKAERGGLSELDKAGFIKRQLVETRQITKHVAQILDSRMNTKYDENDKLIREVKVITLKSKLVSDFRKDFQFYKVREINNYHHAHDAYLNAVVGTALIKKYPKLESEFVYGDYKVYDVRKMIAKSEQEIGKATAKYFFYSNIMNFFKTEITLANGEIRKRPLIETNGETGEIVWDKGRDFATVRKVLSMPQVNIVKKTEVQTGGFSKESILPKRNSDKLIARKKDWDPKKYGGFVSPTVAYSVLVVAKVEKGKSKKLKSVKELLGITIMERSSFEKNPIDFLEAKGYKEVKKDLIIKLPKYSLFELENGRKRMLASARELQKGNELALPSKYVNFLYLASHYEKLKGSPEDNEQKQLFVEQHKHYLDEIIEQISEFSKRVILADANLDKVLSAYNKHRDKPIREQAENIIHLFTLTNLGAPAAFKYFDTTIDRKQYRSTKEVLDATLIHQSITGLYETRIDLSQLGGDEGADKRTADGSEFESPKKKRKV

SEQ ID NO: 354 - protein, 1588 aa, synthetic construct
  REGION 1..1588: note = 14. monoABE8.1_bpNLS + V82S +Q154R polypeptide sequence
MSEVEFSHEYWMRHALTLAKRARDEREVPVGAVLVLNNRVIGEGWNRAIGLHDPTAHAEIMALRQGGLVMQNYRLIDATLYSTFEPCVMCAGAMIHSRIGRVVFGVRNAKTGAAGSLMDVLHYPGMNHRVEITEGILADECAALLCYFFRMPRRVFNAQKKAQSSTDSGGSSGGSSGSETPGTSESATPESSGGSSGGSDKKYSIGLAIGTNSVGWAVITDEYKVPSKKFKVLGNTDRHSIKKNLIGALLFDSGETAEATRLKRTARRRYTRRKNRICYLQEIFSNEMAKVDDSFFHRLEESFLVEEDKKHERHPIFGNIVDEVAYHEKYPTIYHLRKKLVDSTDKADLRLIYLALAHMIKFRGHFLIEGDLNPDNSDVDKLFIQLVQTYNQLFEENPINASGVDAKAILSARLSKSRRLENLIAQLPGEKKNGLFGNLIALSLGLTPNFKSNFDLAEDAKLQLSKDTYDDDLDNLLAQIGDQYADLFLAAKNLSDAILLSDILRVNTEITKAPLSASMIKRYDEHHQDLTLLKALVRQQLPEKYKEIFFDQSKNGYAGYIDGGASQEEFYKFIKPILEKMDGTEELLVKLNREDLLRKQRTFDNGSIPHQIHLGELHAILRRQEDFYPFLKDNREKIEKILTFRIPYYVGPLARGNSRFAWMTRKSEETITPWNFEEVVDKGASAQSFIERMTNFDKNLPNEKVLPKHSLLYEYFTVYNELTKVKYVTEGMRKPAFLSGEQKKAIVDLLFKTNRKVTVKQLKEDYFKKIECFDSVEISGVEDRFNASLGTYHDLLKIIKDKDFLDNEENEDILEDIVLTLTLFEDREMIEERLKTYAHLFDDKVMKQLKRRRYTGWGRLSRKLINGIRDKQSGKTILDFLKSDGFANRNFMQLIHDDSLTFKEDIQKAQVSGQGDSLHEHIANLAGSPAIKKGILQTVKVVDELVKVMGRHKPENIVIEMARENQTTQKGQKNSRERMKRIEEGIKELGSQILKEHPVENTQLQNEKLYLYYLQNGRDMYVDQELDINRLSDYDVDHIVPQSFLKDDSIDNKVLTRSDKNRGKSDNVPSEEVVKKMKNYWRQLLNAKLITQRKFDNLTKAERGGLSELDKAGFIKRQLVETRQITKHVAQILDSRMNTKYDENDKLIREVKVITLKSKLVSDFRKDFQFYKVREINNYHHAHDAYLNAVVGTALIKKYPKLESEFVYGDYKVYDVRKMIAKSEQEIGKATAKYFFYSNIMNFFKTEITLANGEIRKRPLIETNGETGEIVWDKGRDFATVRKVLSMPQVNIVKKTEVQTGGFSKESILPKRNSDKLIARKKDWDPKKYGGFVSPTVAYSVLVVAKVEKGKSKKLKSVKELLGITIMERSSFEKNPIDFLEAKGYKEVKKDLIIKLPKYSLFELENGRKRMLASARELQKGNELALPSKYVNFLYLASHYEKLKGSPEDNEQKQLFVEQHKHYLDEIIEQISEFSKRVILADANLDKVLSAYNKHRDKPIREQAENIIHLFTLTNLGAPAAFKYFDTTIDRKQYRSTKEVLDATLIHQSITGLYETRIDLSQLGGDEGADKRTADGSEFESPKKKRKV

SEQ ID NO: 355 - protein, 4 aa, synthetic construct
  REGION 1..4: note = synthetic peptide sequence
SGGS

SEQ ID NO: 356 - protein, 24 aa, synthetic construct
  REGION 1..24: note = synthetic peptide sequence
SGGSSGSETPGTSESATPESSGGS

SEQ ID NO: 357 - protein, 32 aa, synthetic construct
  REGION 1..32: note = synthetic polypeptide sequence
SGGSSGGSSGSETPGTSESATPESSGGSSGGS

SEQ ID NO: 358 - protein, 104 aa, synthetic construct
  REGION 1..104: note = synthetic polypeptide sequence
GGSGGSPGSPAGSPTSTEEGTSESATPESGPGTSTEPSEGSAPGSPAGSPTSTEEGTSTEPSEGSAPGTSTEPSEGSAPGTSESATPESGPGSEPATSGGSGGS

SEQ ID NO: 359 - protein, 24 aa, synthetic construct
  REGION 1..24: note = synthetic peptide sequence
SGGSSGGSSGSETPGTSESATPES

SEQ ID NO: 360 - protein, 40 aa, synthetic construct
  REGION 1..40: note = synthetic polypeptide sequence
SGGSSGGSSGSETPGTSESATPESSGGSSGGSSGGSSGGS

SEQ ID NO: 361 - protein, 64 aa, synthetic construct
  REGION 1..64: note = synthetic polypeptide sequence
SGGSSGGSSGSETPGTSESATPESSGGSSGGSSGGSSGGSSGSETPGTSESATPESSGGSSGGS

SEQ ID NO: 362 - protein, 92 aa, synthetic construct
  REGION 1..92: note = synthetic polypeptide sequence
PGSPAGSPTSTEEGTSESATPESGPGTSTEPSEGSAPGSPAGSPTSTEEGTSTEPSEGSAPGTSTEPSEGSAPGTSESATPESGPGSEPATS

SEQ ID NO: 363 - protein, 5 aa, synthetic construct
  REGION 1..5: note = synthetic peptide sequence
PAPAP

SEQ ID NO: 364 - protein, 6 aa, synthetic construct
  REGION 1..6: note = synthetic peptide sequence
PAPAPA

SEQ ID NO: 365 - protein, 7 aa, synthetic construct
  REGION 1..7: note = synthetic peptide sequence
PAPAPAP

SEQ ID NO: 366 - protein, 8 aa, synthetic construct
  REGION 1..8: note = synthetic peptide sequence
PAPAPAPA

SEQ ID NO: 367 - protein, 9 aa, synthetic construct
  REGION 1..9: note = synthetic peptide sequence
PAPAPAPAP

SEQ ID NO: 368 - protein, 15 aa, synthetic construct
  REGION 1..15: note = synthetic peptide sequence
PAPAPAPAPAPAPAP

SEQ ID NO: 369 - protein, 21 aa, synthetic construct
  REGION 1..21: note = synthetic peptide sequence
PAPAPAPAPAPAPAPAPAPAP

SEQ ID NO: 370 - DNA, 306 bp, synthetic construct
  misc_feature 1..306: note = DnaE Intein-N polynucleotide sequence
  source 1..306: mol_type = other DNA
tgcctgtcatacgaaaccgagatactgacagtagaatatggccttctgccaatcgggaagattgtggagaaacggatagaatgcacagtttactctgtcgataacaatggtaacatttatactcagccagttgcccagtggcacgaccggggagagcaggaagtattcgaatactgtctggaggatggaagtctcattagggccactaaggaccacaaatttatgacagtcgatggccagatgctgcctatagacgaaatctttgagcgagagttggacctcatgcgagttgacaaccttcctaat

SEQ ID NO: 371 - protein, 102 aa, synthetic construct
  REGION 1..102: note = DnaE Intein-N polypeptide sequence
CLSYETEILTVEYGLLPIGKIVEKRIECTVYSVDNNGNIYTQPVAQWHDRGEQEVFEYCLEDGSLIRATKDHKFMTVDGQMLPIDEIFERELDLMRVDNLPN

SEQ ID NO: 372 - DNA, 108 bp, synthetic construct
  misc_feature 1..108: note = DnaE Intein-C polynucleotide sequence
  source 1..108: mol_type = other DNA
atgatcaagatagctacaaggaagtatcttggcaaacaaaacgtttatgatattggagtcgaaagagatcacaactttgctctgaagaacggattcatagcttctaat

SEQ ID NO: 373 - protein, 36 aa, synthetic construct
  REGION 1..36: note = DnaE Intein-C polypeptide sequence
MIKIATRKYLGKQNVYDIGVERDHNFALKNGFIASN

SEQ ID NO: 374 - DNA, 303 bp, synthetic construct
  misc_feature 1..303: note = Cfa-N polynucleotide sequence
  source 1..303: mol_type = other DNA
tgcctgtcttatgataccgagatacttaccgttgaatatggcttcttgcctattggaaagattgtcgaagagagaattgaatgcacagtatatactgtagacaagaatggtttcgtttacacacagcccattgctcaatggcacaatcgcggcgaacaagaagtatttgagtactgtctcgaggatggaagcatcatacgagcaactaaagatcataaattcatgaccactgacgggcagatgttgccaatagatgagatattcgagcggggcttggatctcaaacaagtggatggattgcca

SEQ ID NO: 375 - protein, 101 aa, synthetic construct
  REGION 1..101: note = Cfa-N polypeptide sequence
CLSYDTEILTVEYGFLPIGKIVEERIECTVYTVDKNGFVYTQPIAQWHNRGEQEVFEYCLEDGSIIRATKDHKFMTTDGQMLPIDEIFERGLDLKQVDGLP

SEQ ID NO: 376 - DNA, 159 bp, synthetic construct
  misc_feature 1..159: note = Cfa-C polynucleotide sequence
  source 1..159: mol_type = other DNA
atgaagaggactgccgatggatcagagtttgaatctcccaagaagaagaggaaagtaaagataatatctcgaaaaagtcttggtacccaaaatgtctatgatattggagtggagaaagatcacaacttccttctcaagaacggtctcgtagccagcaac

SEQ ID NO: 377 - protein, 53 aa, synthetic construct
  REGION 1..53: note = Cfa-C polypeptide sequence
MKRTADGSEFESPKKKRKVKIISRKSLGTQNVYDIGVEKDHNFLLKNGLVASN

SEQ ID NO: 378 - protein, 1081 aa, Neisseria meningitidis
  REGION 1..1081: note = MISC_FEATURE - Nme3Cas9; WP_002217928.1 type II CRISPR RNA-guided endonuclease Cas9 [Neisseria meningitidis]
  REGION 1..1081: note = MISC_FEATURE - NCBI Reference: WP_002217928.1; type II CRISPR RNA-guided endonuclease Cas9; Nme3Cas9 polypeptide sequence
MAAFKPNPINYILGLDIGIASVGWAMVEIDEEENPIRLIDLGVRVFERAEVPKTGDSLAMARRLARSVRRLTRRRAHRLLRARRLLKREGVLQAADFDENGLIKSLPNTPWQLRAAALDRKLTPLEWSAVLLHLIKHRGYLSQRKNEGETADKELGALLKGVADNAHALQTGDFRTPAELALNKFEKECGHIRNQRGDYSHTFSRKDLQAELNLLFEKQKEFGNPHVSGGLKEGIETLLMTQRPALSGDAVQKMLGHCTFEPAEPKAAKNTYTAERFIWLTKLNNLRILEQGSERPLTDTERATLMDEPYRKSKLTYAQARKLLSLEDTAFFKGLRYGKDNAEASTLMEMKAYHTISRALEKEGLKDKKSPLNLSPELQDEIGTAFSLFKTDEDITGRLKDRIQPEILEALLKHISFDKFVQISLKALRRIVPLMEQGKRYDEACAEIYGDHYGKKNTEEKIYLPPIPADEIRNPVVLRALSQARKVINGVVRRYGSPARIHIETAREVGKSFKDRKEIEKRQEENRKDREKAAAKFREYFPNFVGEPKSKDILKLRLYEQQHGKCLYSGKEINLGRLNEKGYVEIDHALPFSRTWDDSFNNKVLVLGSENQNKGNQTPYEYFNGKDNSREWQEFKARVETSRFPRSKKQRILLQKFDEDGFKERNLNDTRYVNRFLCQFVADRMRLTGKGKKRVFASNGQITNLLRGFWGLRKVRAENDRHHALDAVVVACSTVAMQQKITRFVRYKEMNAFDGKTIDKETGEVLHQKTHFPQPWEFFAQEVMIRVFGKPDGKPEFEEADTPEKLRTLLAEKLSSRPEAVHEYVTPLFVSRAPNRKMSGQGHMETVKSAKRLDEGVSVLRVPLTQLKLKDLEKMVNREREPKLYEALKARLEAHKDDPAKAFAEPFYKYDKAGNRTQQVKAVRVEQVQKTGVWVRNHNGIADNATMVRVDVFEKGDKYYLVPIYSWQVAKGILPDRAVVAYADEEDWTVIDESFRFKFVLYSNDLIKVQLKKDSFLGYFSGLDRATGAISLREHDLEKSKGKDGMHRIGVKTALSFQKYQIDEMGKEIRPCRLKKRPPVR

SEQ ID NO: 379 - RNA, 66 nt, synthetic construct
  misc_feature 1..66: note = Telomerase Ku Binding Motif oligonucleotide sequence
  source 1..66: mol_type = other RNA
ttcttgtcgtacttatagatcgctacgttatttcaattttgaaaatctgagtcctgggagtgcgga

SEQ ID NO: 380 - protein, 1094 aa, synthetic construct
  REGION 1..1094: note = Telomerase Ku Heterodimer polypeptide sequence
MSGWESYYKTEGDEEAEEEQEENLEASGDYKYSGRDSLIFLVDASKAMFESQSEDELTPFDMSIQCIQSVYISKIISSDRDLLAVVFYGTEKDKNSVNFKNIYVLQELDNPGAKRILELDQFKGQQGQKRFQDMMGHGSDYSLSEVLWVCANLFSDVQFKMSHKRIMLFTNEDNPHGNDSAKASRARTKAGDLRDTGIFLDLMHLKKPGGFDISLFYRDIISIAEDEDLRVHFEESSKLEDLLRKVRAKETRKRALSRLKLKLNKDIVISVGIYNLVQKALKPPPIKLYRETNEPVKTKTRTFNTSTGGLLLPSDTKRSQIYGSRQIILEKEETEELKRFDDPGLMLMGFKPLVLLKKHHYLRPSLFVYPEESLVIGSSTLFSALLIKCLEKEVAALCRYTPRRNIPPYFVALVPQEEELDDQKIQVTPPGFQLVFLPFADDKRKMPFTEKIMATPEQVGKMKAIVEKLRFTYRSDSFENPVLQQHFRNLEALALDLMEPEQAVDLTLPKVEAMNKRLGSLVDEFKELVYPPDYNPEGKVTKRKHDNEGSGSKRPKVEYSEEELKTHISKGTLGKFTVPMLKEACRAYGLKSGLKKQELLEALTKHFQDMVRSGNKAAVVLCMDVGFTMSNSIPGIESPFEQAKKVITMFVQRQVFAENKDEIALVLFGTDGTDNPLSGGDQYQNITVHRHLMLPDFDLLEDIESKIQPGSQQADFLDALIVSMDVIQHETIGKKFEKRHIEIFTDLSSRFSKSQLDIIIHSLKKCDISERHSIHWPCRLTIGSNLSIRIAAYKSILQERVKKTWTVVDAKTLKKEDIQKETVYCLNDDDETEVLKEDIIQGFRYGSDIVPFSKVDEEQMKYKSEGKCFSVLGFCKSSQVQRRFFMGNQVLKVFAARDDEAAAVALSSLIHALDDLDMVAIVRYAYDKRANPQVGVAFPHIKHNYECLVYVQLPFMEDLRQYMFSSLKNSKKYAPTEAQLNAVDALIDSMSLAKKDEKTDTLEDLFPTTKIPNPRFQRLFQCLLHRALHPREPLPPIQQHIWNMLNPPAEVTTKSQIPLSKIKTLFPLIEAKKKDQVTAQEIFQDNHEDGPTAK

SEQ ID NO: 381 - RNA, 10 nt, synthetic construct
  misc_feature 1..10: note = Telomerase Sm7 consensus site(single stranded) oligonucleotide sequence
  source 1..10: mol_type = other RNA
aatttttgga

SEQ ID NO: 382 - protein, 83 aa, synthetic construct
  REGION 1..83: note = MS2 coat protein polypeptide sequence
GSVIDVSSQRVNVQRPLDALGNSLNSPVIIKLKGDREFRGVLKSFDLHMNLVLNDAEELEDGEVTRRLGTVLIRGDNIVYISP

SEQ ID NO: 383 - RNA, 26 nt, synthetic construct
  misc_feature 1..26: note = PP7 phage operator stem loop oligonucleotide sequence
  source 1..26: mol_type = other RNA
ataaggagtttatatggaaaccctta

SEQ ID NO: 384 - protein, 128 aa, synthetic construct
  REGION 1..128: note = PP7 coat protein (PCP)polypeptide sequence
MSKTIVLSVGEATRTLTEIQSTADRQIFEEKVGPLVGRLRLTASLRQNGAKTAYRVNLKLDQADVVDCSTSVCGELPKVRYTQVWSHDVTIVANSTEASRKSLYDLTKSLVATSQVEDLVVNLVPLGR

SEQ ID NO: 385 - RNA, 19 nt, synthetic construct
  misc_feature 1..19: note = SfMu Com stem loop oligonucleotide sequence
  source 1..19: mol_type = other RNA
ctgaatgcctgcgagcatc

SEQ ID NO: 386 - protein, 62 aa, synthetic construct
  REGION 1..62: note = SfMu Com binding protein polypeptide sequence
MKSIRCKNCNKLLFKADSFDHIEIRCPRCKRHIIMLNACEHPTEKHCGKREKITHSDETVRY

SEQ ID NO: 387 - protein, 47 aa, synthetic construct
  REGION 1..47: note = leucine zipper polypeptide sequence
LEIRAAFLRQRNTALRTEVAELEQEVQRLENEVSQYETRYGPLGGGK

SEQ ID NO: 388 - protein, 47 aa, synthetic construct
  REGION 1..47: note = leucine zipper polypeptide sequence
LEIEAAFLERENTALETRVAELRQRVQRLRNRVSQYRTRYGPLGGGK

SEQ ID NO: 389 - DNA, 303 bp, synthetic construct
  source 1..303: mol_type = other DNA
tgcctgagctacgataccgagatcctgaccgtggaatacggcttcctgcctatcggcaagatcgtcgaggaacggatcgagtgcacagtgtacaccgtggataagaatggcttcgtgtacacccagcctatcgctcagtggcacaacagaggcgagcaagaggtgttcgagtactgcctggaagatggcagcatcatccgggccaccaaggaccacaagtttatgaccaccgacggccagatgctgcccatcgacgagatctttgagagaggcctggacctgaaacaggtggacggactgcct

SEQ ID NO: 390 - protein, 101 aa, synthetic construct; identical to SEQ ID NO: 375

SEQ ID NO: 391 - DNA, 264 bp, synthetic construct
  source 1..264: mol_type = other DNA
tgtctggacctcaagacccaagtgcagacacctcagggcatgaaagagattagcaatatccaggtgggcgacctggtcctgagcaacaccggctacaacgaggtgctgaacgtgttccctaagtccaagaagaaatcttataagatcaccctggaagatggcaaggaaatcatctgcagcgaggaacacctgttccccacccagaccggcgagatgaacatcagcggcggactgaaggagggcatgtgcctgtacgtgaaggag

SEQ ID NO: 392 - protein, 88 aa, synthetic construct
CLDLKTQVQTPQGMKEISNIQVGDLVLSNTGYNEVLNVFPKSKKKSYKITLEDGKEIICSEEHLFPTQTGEMNISGGLKEGMCLYVKE

SEQ ID NO: 393 - DNA, 267 bp, synthetic construct
  source 1..267: mol_type = other DNA
tgcctgagcctggacaccatggtggtgacaaacggcaaggccatcgagatcagagatgtgaaggtgggagattggctggaaagcgaatgtggcccagtgcaggttacagaggtgctgcctatcatcaagcagcctgtctttgagattgtgctgaaaagcggaaaaaagatccgggtgtccgctaatcacaagttccccaccaaggacggcctcaagaccatcaacagcggcctgaaggtgggcgacttcctgagaagcagagccaag

SEQ ID NO: 394 - protein, 89 aa, synthetic construct
CLSLDTMVVTNGKAIEIRDVKVGDWLESECGPVQVTEVLPIIKQPVFEIVLKSGKKIRVSANHKFPTKDGLKTINSGLKVGDFLRSRAK

SEQ ID NO: 395 - DNA, 303 bp, synthetic construct
  source 1..303: mol_type = other DNA
tgttttgtgcctggcaccctggtgaacacagagaatggcctgaagaaaatcgaggaaatcaaggtgggcgacaaggtgttcagccatacaggcaagctgcaggaggtggtggacaccctgatcttcgaccgggacgaggaaatcatctctatcaacggcattgattgcaccaagaaccacgagttctacgtgatcgataaggaaaacgctaatagagtgaacgaggacaacatccacctcttcgccagatgggtccacgccgaggaactggatatgaaaaagcacctgctgatcgagctggaa

SEQ ID NO: 396 - protein, 101 aa, synthetic construct
CFVPGTLVNTENGLKKIEEIKVGDKVFSHTGKLQEVVDTLIFDRDEEIISINGIDCTKNHEFYVIDKENANRVNEDNIHLFARWVHAEELDMKKHLLIELE

SEQ ID NO: 397 - DNA, 315 bp, synthetic construct
  source 1..315: mol_type = other DNA
tgcctggtgggctctagcgagattatcacaagaaactacggcaagaccaccatcaaggaagtggtcgagatcttcgacaacgacaagaatatccaggtgctggccttcaacacccacaccgataatatcgagtgggcccctatcaaggccgctcagctgaccagacctaacgccgagctggttgaactggaaatcgacaccctgcacggcgtgaaaacaatccggtgcacccctgaccaccccgtgtacaccaagaacagaggctacgtgcgggccgacgagctgacagatgatgacgagctcgtggtggctatc

SEQ ID NO: 398 - protein, 105 aa, synthetic construct
CLVGSSEIITRNYGKTTIKEVVEIFDNDKNIQVLAFNTHTDNIEWAPIKAAQLTRPNAELVELEIDTLHGVKTIRCTPDHPVYTKNRGYVRADELTDDDELVVAI

SEQ ID NO: 399 - DNA, 306 bp, synthetic construct
  source 1..306: mol_type = other DNA
tgcctgagctacgagacagagatcctgaccgtggaatatggcctgctgccaatcggaaagatcgtggaaaagcggatcgagtgcaccgtctacagcgtggacaacaacggaaatatctatacacagcctgtggcccaatggcacgaccggggcgaacaggaggtgtttgagtactgcctggaagatggttctctgattagagccaccaaggaccacaagttcatgaccgtcgacggccagatgctgcccatcgacgaaatcttcgagcgggaactcgacctgatgagagtggataacctgcccaat

SEQ ID NO: 400 - protein, 102 aa, synthetic construct; identical to SEQ ID NO: 371

SEQ ID NO: 401 - protein, 101 aa, synthetic construct; identical to SEQ ID NO: 375

SEQ ID NO: 402 - protein, 102 aa, synthetic construct; identical to SEQ ID NO: 371

SEQ ID NO: 403 - DNA, 279 bp, synthetic construct
  source 1..279: mol_type = other DNA
acaagaagcggatactgtctggacctcaagacccaagtgcagacacctcagggcatgaaagagattagcaatatccaggtgggcgacctggtcctgagcaacaccggctacaacgaggtgctgaacgtgttccctaagtccaagaagaaatcttataagatcaccctggaagatggcaaggaaatcatctgcagcgaggaacacctgttccccacccagaccggcgagatgaacatcagcggcggactgaaggagggcatgtgcctgtacgtgaaggag

SEQ ID NO: 404 - protein, 93 aa, synthetic construct
TRSGYCLDLKTQVQTPQGMKEISNIQVGDLVLSNTGYNEVLNVFPKSKKKSYKITLEDGKEIICSEEHLFPTQTGEMNISGGLKEGMCLYVKE

SEQ ID NO: 405 - DNA, 282 bp, synthetic construct
  source 1..282: mol_type = other DNA
tctcagctgaaccggtgcctgagcctggacaccatggtggtgacaaacggcaaggccatcgagatcagagatgtgaaggtgggagattggctggaaagcgaatgtggcccagtgcaggttacagaggtgctgcctatcatcaagcagcctgtctttgagattgtgctgaaaagcggaaaaaagatccgggtgtccgctaatcacaagttccccaccaaggacggcctcaagaccatcaacagcggcctgaaggtgggcgacttcctgagaagcagagccaag

SEQ ID NO: 406 - protein, 94 aa, synthetic construct
SQLNRCLSLDTMVVTNGKAIEIRDVKVGDWLESECGPVQVTEVLPIIKQPVFEIVLKSGKKIRVSANHKFPTKDGLKTINSGLKVGDFLRSRAK

SEQ ID NO: 407 - DNA, 318 bp, synthetic construct
  source 1..318: mol_type = other DNA
ggcatcggcggaggatgttttgtgcctggcaccctggtgaacacagagaatggcctgaagaaaatcgaggaaatcaaggtgggcgacaaggtgttcagccatacaggcaagctgcaggaggtggtggacaccctgatcttcgaccgggacgaggaaatcatctctatcaacggcattgattgcaccaagaaccacgagttctacgtgatcgataaggaaaacgctaatagagtgaacgaggacaacatccacctcttcgccagatgggtccacgccgaggaactggatatgaaaaagcacctgctgatcgagctggaa

SEQ ID NO: 408 - protein, 106 aa, synthetic construct
GIGGGCFVPGTLVNTENGLKKIEEIKVGDKVFSHTGKLQEVVDTLIFDRDEEIISINGIDCTKNHEFYVIDKENANRVNEDNIHLFARWVHAEELDMKKHLLIELE

SEQ ID NO: 409 - DNA, 330 bp, synthetic construct
  source 1..330: mol_type = other DNA
ggaacaaacccatgttgcctggtgggctctagcgagattatcacaagaaactacggcaagaccaccatcaaggaagtggtcgagatcttcgacaacgacaagaatatccaggtgctggccttcaacacccacaccgataatatcgagtgggcccctatcaaggccgctcagctgaccagacctaacgccgagctggttgaactggaaatcgacaccctgcacggcgtgaaaacaatccggtgcacccctgaccaccccgtgtacaccaagaacagaggctacgtgcgggccgacgagctgacagatgatgacgagctcgtggtggctatc

SEQ ID NO: 410 - protein, 110 aa, synthetic construct
GTNPCCLVGSSEIITRNYGKTTIKEVVEIFDNDKNIQVLAFNTHTDNIEWAPIKAAQLTRPNAELVELEIDTLHGVKTIRCTPDHPVYTKNRGYVRADELTDDDELVVAI

SEQ ID NO: 411 - DNA, 105 bp, synthetic construct
  source 1..105: mol_type = other DNA
gtcaagatcatcagcagaaagagcctgggcacccagaacgtgtacgatatcggagtgggcgagccccacaactttctgctcaagaatggcctggtggccagcaac

SEQ ID NO: 412 - protein, 35 aa, synthetic construct
VKIISRKSLGTQNVYDIGVGEPHNFLLKNGLVASN

SEQ ID NO: 413 - DNA, 114 bp, synthetic construct
  source 1..114: mol_type = other DNA
atgatgctgaaaaagatcctgaagatcgaggaactggatgagagagagctgatcgacatcgaagtgtctggcaatcacctgttctacgccaacgacatcctgacccacaacagc

SEQ ID NO: 414 - protein, 38 aa, synthetic construct
MMLKKILKIEELDERELIDIEVSGNHLFYANDILTHNS

SEQ ID NO: 415 - DNA, 138 bp, synthetic construct
  source 1..138: mol_type = other DNA
atgtgcgaaatcttcgagaacgagattgattgggacgaaatcgcctctatcgagtacgtgggcgtggaagagacaatcgacatcaacgtgaccaacgacagactgtttttcgccaatggcatcctgacccacaacagc

SEQ ID NO: 416 - protein, 46 aa, synthetic construct
MCEIFENEIDWDEIASIEYVGVEETIDINVTNDRLFFANGILTHNS

SEQ ID NO: 417 - DNA, 123 bp, synthetic construct
  source 1..123: mol_type = other DNA
atgaaattcaagctgaaggaaatcaccagcatcgagacaaagcactacaagggcaaggtgcacgatctgaccgtgaaccaggaccacagctacaacgtcagaggcaccgtggtgcataattct

SEQ ID NO: 418 - protein, 41 aa, synthetic construct
MKFKLKEITSIETKHYKGKVHDLTVNQDHSYNVRGTVVHNS

SEQ ID NO: 419 - DNA, 123 bp, synthetic construct
  source 1..123: mol_type = other DNA
atggaagccaagacctacatcggcaagctgaaatctagaaagatcgtgtccaacgaggatacatacgacatccagaccagcacccacaatttcttcgccaacgacatcctggtgcacaacagc

SEQ ID NO: 420 - protein, 41 aa, synthetic construct
MEAKTYIGKLKSRKIVSNEDTYDIQTSTHNFFANDILVHNS

SEQ ID NO: 421 - DNA, 108 bp, synthetic construct
  source 1..108: mol_type = other DNA
atgatcaagatcgccacaagaaagtacctgggcaagcagaacgtgtacgacatcggcgtggagagagaccacaacttcgccctgaagaacggctttatcgcctctaat

SEQ ID NO: 422 - protein, 36 aa, synthetic construct; identical to SEQ ID NO: 373

SEQ ID NO: 423 - protein, 36 aa, synthetic construct
MVKIISRKSLGTQNVYDIGVGEPHNFLLKNGLVASN

SEQ ID NO: 424 - protein, 35 aa, synthetic construct
IKIATRKYLGKQNVYDIGVERDHNFALKNGFIASN

SEQ ID NO: 425 - DNA, 88 bp, synthetic construct
  source 1..88: mol_type = other DNA; note = SaCas9 scaffold sequence
gttttagtactctgtaatgaaaattacagaatctactaaaacaaggcaaaatgccgtgtttatctcgtcaacttgttggcgagatttt

SEQ ID NO: 426 - RNA, 20 nt, synthetic construct
  source 1..20: mol_type = other RNA
ttaccccgaggaagagatga

SEQ ID NO: 427 - RNA, 20 nt, synthetic construct
  source 1..20: mol_type = other RNA
taacttttcagatgtctgtc

SEQ ID NO: 428 - RNA, 20 nt, synthetic construct
  source 1..20: mol_type = other RNA
aacttttcagatgtctgtca

SEQ ID NO: 429 - RNA, 20 nt, synthetic construct
  source 1..20: mol_type = other RNA
ttttttactttagagagacc

SEQ ID NO: 430 - RNA, 20 nt, synthetic construct
  source 1..20: mol_type = other RNA
ctccacagcttagaaattag

SEQ ID NO: 431 - protein, 191 aa, synthetic construct
MHDSNNVEKDITPSELPANPGCLHSKEHSIKATLIWRLFFLIMFLTIIVCGMVAALSAIRANCHQEPSVCLQAACPESWIGFQRKCFYFSDDTKNWTSSQRFCDSQDADLAQVESFQELNFLLRYKGPSDHWIGLSREQGQPWKWINGTEWTRQFPILGAGECAYLNDKGASSARHYTERKWICSKSDIHV

SEQ ID NO: 432 - protein, 162 aa, synthetic construct
MASRSFKVRFFLIMFLTIIVCGMVAALSAIRANCHQEPSVCLQAACPESWIGFQRKCFYFSDDTKNWTSSQRFCDSQDADLAQVESFQELNFLLRYKGPSDHWIGLSREQGQPWKWINGTEWTRQFPILGAGECAYLNDKGASSARHYTERKWICSKSDIHV

SEQ ID NO: 433 - protein, 162 aa, synthetic construct
MRVKFSRSAFFLIMFLTIIVCGMVAALSAIRANCHQEPSVCLQAACPESWIGFQRKCFYFSDDTKNWTSSQRFCDSQDADLAQVESFQELNFLLRYKGPSDHWIGLSREQGQPWKWINGTEWTRQFPILGAGECAYLNDKGASSARHYTERKWICSKSDIHV

SEQ ID NO: 434 - protein, 162 aa, synthetic construct
MASRSFKVRPFFFCCFIAVAMGIRFIIMVTRANCHQEPSVCLQAACPESWIGFQRKCFYFSDDTKNWTSSQRFCDSQDADLAQVESFQELNFLLRYKGPSDHWIGLSREQGQPWKWINGTEWTRQFPILGAGECAYLNDKGASSARHYTERKWICSKSDIHV

SEQ ID NO: 435 - protein, 162 aa, synthetic construct
MRVKFSRSAPFFFCCFIAVAMGIRFIIMVTRANCHQEPSVCLQAACPESWIGFQRKCFYFSDDTKNWTSSQRFCDSQDADLAQVESFQELNFLLRYKGPSDHWIGLSREQGQPWKWINGTEWTRQFPILGAGECAYLNDKGASSARHYTERKWICSKSDIHV

SEQ ID NO: 436 - protein, 185 aa, synthetic construct
MALPVTALLLPLALLLHAARPVHIDSKSCIWKRETYHRASSAGKDNLYACEGAGLIPFQRTWETGNIWKWPQGQERSLGIWHDSPGKYRLLFNLEQFSEVQALDADQSDCFRQSSTWNKTDDSFYFCKRQFGIWSEPCAAQLCVSPEQHCNARIYIWAPLAGTCGVLLLSLVITLYCRVKFSRSA

SEQ ID NO: 437 - protein, 185 aa, synthetic construct; identical to SEQ ID NO: 436

SEQ ID NO: 438 - protein, 179 aa, synthetic construct
MALPVTALLLPLALLLHAARPVHIDSKSCIWKRETYHRASSAGKDNLYACEGAGLIPFQRTWETGNIWKWPQGQERSLGIWHDSPGKYRLLFNLEQFSEVQALDADQSDCFRQSSTWNKTDDSFYFCKRQFGIWSEPCAAQLCVSPEQHCNARMALIVLGGVAGLLLFIGLGIFFCVRC

SEQ ID NO: 439 - protein, 185 aa, synthetic construct
MALPVTALLLPLALLLHAARPRANCHQEPSVCLQAACPESWIGFQRKCFYFSDDTKNWTSSQRFCDSQDADLAQVESFQELNFLLRYKGPSDHWIGLSREQGQPWKWINGTEWTRQFPILGAGECAYLNDKGASSARHYTERKWICSKSDIHVIYIWAPLAGTCGVLLLSLVITLYCRVKFSRSA

SEQ ID NO: 440 - protein, 230 aa, synthetic construct
MALPVTALLLPLALLLHAARPRANCHQEPSVCLQAACPESWIGFQRKCFYFSDDTKNWTSSQRFCDSQDADLAQVESFQELNFLLRYKGPSDHWIGLSREQGQPWKWINGTEWTRQFPILGAGECAYLNDKGASSARHYTERKWICSKSDIHVTTTPAPRPPTPAPTIASQPLSLRPEACRPAAGGAVHTRGLDFACDIYIWAPLAGTCGVLLLSLVITLYCRVKFSRSA

SEQ ID NO: 441 - protein, 179 aa, synthetic construct
MALPVTALLLPLALLLHAARPRANCHQEPSVCLQAACPESWIGFQRKCFYFSDDTKNWTSSQRFCDSQDADLAQVESFQELNFLLRYKGPSDHWIGLSREQGQPWKWINGTEWTRQFPILGAGECAYLNDKGASSARHYTERKWICSKSDIHVMALIVLGGVAGLLLFIGLGIFFCVRC

SEQ ID NO: 442 - protein, 246 aa, synthetic construct
MALPVTALLLPLALLLHAARPRANCHQEPSVCLQAACPESWIGFQRKCFYFSDDTKNWTSSQRFCDSQDADLAQVESFQELNFLLRYKGPSDHWIGLSREQGQPWKWINGTEWTRQFPILGAGECAYLNDKGASSARHYTERKWICSKSDIHVELPTQGTFSNVSTNVSTTTPAPRPPTPAPTIASQPLSLRPEACRPAAGGAVHTRGLDFACDIYIWAPLAGTCGVLLLSLVITLYCRVKFSRSA

SEQ ID NO: 443 - protein, 251 aa, synthetic construct
MALPVTALLLPLALLLHAARPRANCHQEPSVCLQAACPESWIGFQRKCFYFSDDTKNWTSSQRFCDSQDADLAQVESFQELNFLLRYKGPSDHWIGLSREQGQPWKWINGTEWTRQFPILGAGECAYLNDKGASSARHYTERKWICSKSDIHVGGGGSELPTQGTFSNVSTNVSTTTPAPRPPTPAPTIASQPLSLRPEACRPAAGGAVHTRGLDFACDIYIWAPLAGTCGVLLLSLVITLYCRVKFSRSA

SEQ ID NO: 444 - protein, 190 aa, synthetic construct
MALPVTALLLPLALLLHAARPRANCHQEPSVCLQAACPESWIGFQRKCFYFSDDTKNWTSSQRFCDSQDADLAQVESFQELNFLLRYKGPSDHWIGLSREQGQPWKWINGTEWTRQFPILGAGECAYLNDKGASSARHYTERKWICSKSDIHVPNKGSGTTSGTTRLLSGHTCFTLTGLLGTLVTMGLLT

SEQ ID NO: 445 - protein, 235 aa, synthetic construct
MALPVTALLLPLALLLHAARPRANCHQEPSVCLQAACPESWIGFQRKCFYFSDDTKNWTSSQRFCDSQDADLAQVESFQELNFLLRYKGPSDHWIGLSREQGQPWKWINGTEWTRQFPILGAGECAYLNDKGASSARHYTERKWICSKSDIHVTTTPAPRPPTPAPTIASQPLSLRPEACRPAAGGAVHTRGLDFACDPNKGSGTTSGTTRLLSGHTCFTLTGLLGTLVTMGLLT

SEQ ID NO: 446 - DNA, 573 bp, synthetic construct
  source 1..573: mol_type = other DNA
atgcatgacagcaacaacgtggagaaggatattacacccagcgagttgccagctaacccaggctgtttgcacagtaaggagcacagcatcaaagctactctcatttggaggctctttttcctcatcatgtttctgaccataatcgtgtgtggcatggtcgcagcccttagcgcgatccgagccaattgtcatcaggaaccgtcagtttgtctccaggcagcttgcccggaatcatggatagggttccagcggaagtgcttttacttctcagacgacacaaagaactggacaagtagtcagcggttctgcgactcccaggatgccgacctggcgcaggttgagtcctttcaagagttgaattttttgctccgatacaaagggccatccgatcattggataggtctctcccgagaacagggtcagccgtggaagtggatcaatggcactgagtggacgaggcagttcccaatattgggcgctggagagtgtgcgtaccttaacgataagggcgcgagtagcgcgaggcactacaccgagagaaagtggatatgttcaaaaagtgatattcatgtc

SEQ ID NO: 447 - DNA, 964 bp, synthetic construct
  source 1..964: mol_type = other DNA
atggcatcaagaagcttcaaagtaagattcttcctgatcatgtttcttactatcattgtttgtgggatggtagctgcactttccgccattcgggccaattgtcatcaggaaccaagtgtgtgccttcaggccgcgtgtcctgaatcatggataggctttcaacggaagtgtttttatttttccgacgacactaaaaactggactagtagtcaacggttttgcgattctcaagatgcggatcttgcccaagtggagtccttccaagagttgaattttcttcttcgatataaaggtccttcagaccattggatagggttgtccagggaacagggacaaccgtggaagtggataaacggcacagaatggacccggcagttccctatattgggcgcgggcgagtgcgcttacctcaatgacaaaggcgcttcatctgccagacattacacggaacgaaagtggatctgtagtaagtccgatattcacgtcaagaagcttcaaagtaagattcttcctgatcatgtttcttactatcattgtttgtgggatggtagctgcactttccgccattcgggccaattgtcatcaggaaccaagtgtgtgccttcaggccgcgtgtcctgaatcatggataggctttcaacggaagtgtttttatttttccgacgacactaaaaactggactagtagtcaacggttttgcgattctcaagatgcggatcttgcccaagtggagtccttccaagagttgaattttcttcttcgatataaaggtccttcagaccattggatagggttgtccagggaacagggacaaccgtggaagtggataaacggcacagaatggacccggcagttccctatattgggcgcgggcgagtgcgcttacctcaatgacaaaggcgcttcatctgccagacattacacggaacgaaagtggatctgtagtaagtccgatattcacgtc

SEQ ID NO: 448 - DNA, 486 bp, synthetic construct
  source 1..486: mol_type = other DNA
atgcgggtaaagttttcacggtctgccttcttcctgatcatgtttcttactatcattgtttgtgggatggtagctgcactttccgccattcgggccaattgtcatcaggaaccaagtgtgtgccttcaggccgcgtgtcctgaatcatggataggctttcaacggaagtgtttttatttttccgacgacactaaaaactggactagtagtcaacggttttgcgattctcaagatgcggatcttgcccaagtggagtccttccaagagttgaattttcttcttcgatataaaggtccttcagaccattggatagggttgtccagggaacagggacaaccgtggaagtggataaacggcacagaatggacccggcagttccctatattgggcgcgggcgagtgcgcttacctcaatgacaaaggcgcttcatctgccagacattacacggaacgaaagtggatctgtagtaagtccgatattcacgtc

SEQ ID NO: 449 - DNA, 486 bp, synthetic construct
  source 1..486: mol_type = other DNA
atggcatcaagaagcttcaaagtaagacccttctttttttgttgcttcatcgcggtcgccatgggaatacgattcatcatcatggttacacgggccaattgtcatcaggaaccaagtgtgtgccttcaggccgcgtgtcctgaatcatggataggctttcaacggaagtgtttttatttttccgacgacactaaaaactggactagtagtcaacggttttgcgattctcaagatgcggatcttgcccaagtggagtccttccaagagttgaattttcttcttcgatataaaggtccttcagaccattggatagggttgtccagggaacagggacaaccgtggaagtggataaacggcacagaatggacccggcagttccctatattgggcgcgggcgagtgcgcttacctcaatgacaaaggcgcttcatctgccagacattacacggaacgaaagtggatctgtagtaagtccgatattcacgtc

SEQ ID NO: 450 - DNA, 486 bp, synthetic construct
  source 1..486: mol_type = other DNA
atgcgggtaaagttttcacggtctgcccccttctttttttgttgcttcatcgcggtcgccatgggaatacgattcatcatcatggttacacgggccaattgtcatcaggaaccaagtgtgtgccttcaggccgcgtgtcctgaatcatggataggctttcaacggaagtgtttttatttttccgacgacactaaaaactggactagtagtcaacggttttgcgattctcaagatgcggatcttgcccaagtggagtccttccaagagttgaattttcttcttcgatataaaggtccttcagaccattggatagggttgtccagggaacagggacaaccgtggaagtggataaacggcacagaatggacccggcagttccctatattgggcgcgggcgagtgcgcttacctcaatgacaaaggcgcttcatctgccagacattacacggaacgaaagtggatctgtagtaagtccgatattcacgtc

SEQ ID NO: 451 - DNA, 555 bp, synthetic construct
  source 1..555: mol_type = other DNA
atggccctgcccgtgaccgccctgctgctgcccctggccctgctgctgcacgccgccaggcccgttcacatcgactcaaagtcctgtatttggaaaagagaaacatatcaccgagcgtcttctgcgggaaaggataacctttacgcttgcgagggtgctgggttgatcccattccaacgaacgtgggaaacaggtaatatctggaagtggccccaaggtcaggagaggtcccttggtatatggcatgattcacctggcaagtacaggctgctgtttaaccttgaacaatttagtgaggttcaggccctggatgctgaccagagcgactgctttcgccagagtagtacgtggaacaagacggacgattccttttatttctgcaaacggcagtttggaatatggtctgaaccgtgcgctgcgcagctctgtgtgtctccagaacagcattgtaacgctcgaatctacatctgggcgcccttggccgggacttgtggggtccttctcctgtcactggttatcaccctttactgcagagtgaagttcagcaggagcgca

SEQ ID NO: 452 - DNA, 690 bp, synthetic construct
  source 1..690: mol_type = other DNA
atggccctgcccgtgaccgccctgctgctgcccctggccctgctgctgcacgccgccaggcccgttcacatcgactcaaagtcctgtatttggaaaagagaaacatatcaccgagcgtcttctgcgggaaaggataacctttacgcttgcgagggtgctgggttgatcccattccaacgaacgtgggaaacaggtaatatctggaagtggccccaaggtcaggagaggtcccttggtatatggcatgattcacctggcaagtacaggctgctgtttaaccttgaacaatttagtgaggttcaggccctggatgctgaccagagcgactgctttcgccagagtagtacgtggaacaagacggacgattccttttatttctgcaaacggcagtttggaatatggtctgaaccgtgcgctgcgcagctctgtgtgtctccagaacagcattgtaacgctcgaaccacgacgccagcgccgcgaccaccaacaccggcgcccaccatcgcgtcgcagcccctgtccctgcgcccagaggcgtgccggccagcggcggggggcgcagtgcacacgagggggctggacttcgcctgtgatatctacatctgggcgcccttggccgggacttgtggggtccttctcctgtcactggttatcaccctttactgcagagtgaagttcagcaggagcgca

SEQ ID NO: 453 - DNA, 537 bp, synthetic construct
  source 1..537: mol_type = other DNA
atggccctgcccgtgaccgccctgctgctgcccctggccctgctgctgcacgccgccaggcccgttcacatcgactcaaagtcctgtatttggaaaagagaaacatatcaccgagcgtcttctgcgggaaaggataacctttacgcttgcgagggtgctgggttgatcccattccaacgaacgtgggaaacaggtaatatctggaagtggccccaaggtcaggagaggtcccttggtatatggcatgattcacctggcaagtacaggctgctgtttaaccttgaacaatttagtgaggttcaggccctggatgctgaccagagcgactgctttcgccagagtagtacgtggaacaagacggacgattccttttatttctgcaaacggcagtttggaatatggtctgaaccgtgcgctgcgcagctctgtgtgtctccagaacagcattgtaacgctcgaatggccctgatcgtgctgggcggcgtggccggcctgctgctgttcatcggcctgggcatttttttctgcgtgcggtgc

SEQ ID NO: 454 - DNA, 555 bp, synthetic construct
  source 1..555: mol_type = other DNA
atggccctgcccgtgaccgccctgctgctgcccctggccctgctgctgcacgccgccaggccccgggccaattgtcatcaggaaccaagtgtgtgccttcaggccgcgtgtcctgaatcatggataggctttcaacggaagtgtttttatttttccgacgacactaaaaactggactagtagtcaacggttttgcgattctcaagatgcggatcttgcccaagtggagtccttccaagagttgaattttcttcttcgatataaaggtccttcagaccattggatagggttgtccagggaacagggacaaccgtggaagtggataaacggcacagaatggacccggcagttccctatattgggcgcgggcgagtgcgcttacctcaatgacaaaggcgcttcatctgccagacattacacggaacgaaagtggatctgtagtaagtccgatattcacgtcatctacatctgggcgcccttggccgggacttgtggggtccttctcctgtcactggttatcaccctttactgcagagtgaagttcagcaggagcgca

SEQ ID NO: 455 - DNA, 690 bp, synthetic construct
  source 1..690: mol_type = other DNA
atggccctgcccgtgaccgccctgctgctgcccctggccctgctgctgcacgccgccaggccccgggccaattgtcatcaggaaccaagtgtgtgccttcaggccgcgtgtcctgaatcatggataggctttcaacggaagtgtttttatttttccgacgacactaaaaactggactagtagtcaacggttttgcgattctcaagatgcggatcttgcccaagtggagtccttccaagagttgaattttcttcttcgatataaaggtccttcagaccattggatagggttgtccagggaacagggacaaccgtggaagtggataaacggcacagaatggacccggcagttccctatattgggcgcgggcgagtgcgcttacctcaatgacaaaggcgcttcatctgccagacattacacggaacgaaagtggatctgtagtaagtccgatattcacgtcaccacgacgccagcgccgcgaccaccaacaccggcgcccaccatcgcgtcgcagcccctgtccctgcgcccagaggcgtgccggccagcggcggggggcgcagtgcacacgagggggctggacttcgcctgtgatatctacatctgggcgcccttggccgggacttgtggggtccttctcctgtcactggttatcaccctttactgcagagtgaagttcagcaggagcgca

SEQ ID NO: 456 - DNA, 537 bp, synthetic construct
  source 1..537: mol_type = other DNA
atggccctgcccgtgaccgccctgctgctgcccctggccctgctgctgcacgccgccaggccccgggccaattgtcatcaggaaccaagtgtgtgccttcaggccgcgtgtcctgaatcatggataggctttcaacggaagtgtttttatttttccgacgacactaaaaactggactagtagtcaacggttttgcgattctcaagatgcggatcttgcccaagtggagtccttccaagagttgaattttcttcttcgatataaaggtccttcagaccattggatagggttgtccagggaacagggacaaccgtggaagtggataaacggcacagaatggacccggcagttccctatattgggcgcgggcgagtgcgcttacctcaatgacaaaggcgcttcatctgccagacattacacggaacgaaagtggatctgtagtaagtccgatattcacgtcatggccctgatcgtgctgggcggcgtggccggcctgctgctgttcatcggcctgggcatttttttctgcgtgcggtgc

SEQ ID NO: 457 - DNA, 738 bp, synthetic construct
  source 1..738: mol_type = other DNA
atggccctgcccgtgaccgccctgctgctgcccctggccctgctgctgcacgccgccaggccccgggccaattgtcatcaggaaccaagtgtgtgccttcaggccgcgtgtcctgaatcatggataggctttcaacggaagtgtttttatttttccgacgacactaaaaactggactagtagtcaacggttttgcgattctcaagatgcggatcttgcccaagtggagtccttccaagagttgaattttcttcttcgatataaaggtccttcagaccattggatagggttgtccagggaacagggacaaccgtggaagtggataaacggcacagaatggacccggcagttccctatattgggcgcgggcgagtgcgcttacctcaatgacaaaggcgcttcatctgccagacattacacggaacgaaagtggatctgtagtaagtccgatattcacgtcgagctccctacgcaagggacttttagtaacgtatctacaaatgtaagcaccacgacgccagcgccgcgaccaccaacaccggcgcccaccatcgcgtcgcagcccctgtccctgcgcccagaggcgtgccggccagcggcggggggcgcagtgcacacgagggggctggacttcgcctgtgatatctacatctgggcgcccttggccgggacttgtggggtccttctcctgtcactggttatcaccctttactgcagagtgaagttcagcaggagcgca

SEQ ID NO: 458 - DNA, 753 bp, synthetic construct
  source 1..753: mol_type = other DNA
atggccctgcccgtgaccgccctgctgctgcccctggccctgctgctgcacgccgccaggccccgggccaattgtcatcaggaaccaagtgtgtgccttcaggccgcgtgtcctgaatcatggataggctttcaacggaagtgtttttatttttccgacgacactaaaaactggactagtagtcaacggttttgcgattctcaagatgcggatcttgcccaagtggagtccttccaagagttgaattttcttcttcgatataaaggtccttcagaccattggatagggttgtccagggaacagggacaaccgtggaagtggataaacggcacagaatggacccggcagttccctatattgggcgcgggcgagtgcgcttacctcaatgacaaaggcgcttcatctgccagacattacacggaacgaaagtggatctgtagtaagtccgatattcacgtcggtggaggggggagcgagctccctacgcaagggacttttagtaacgtatctacaaatgtaagcaccacgacgccagcgccgcgaccaccaacaccggcgcccaccatcgcgtcgcagcccctgtccctgcgcccagaggcgtgccggccagcggcggggggcgcagtgcacacgagggggctggacttcgcctgtgatatctacatctgggcgcccttggccgggacttgtggggtccttctcctgtcactggttatcaccctttactgcagagtgaagttcagcaggagcgca

SEQ ID NO: 459 - DNA, 570 bp, synthetic construct
  source 1..570: mol_type = other DNA
atggccctgcccgtgaccgccctgctgctgcccctggccctgctgctgcacgccgccaggccccgggccaattgtcatcaggaaccaagtgtgtgccttcaggccgcgtgtcctgaatcatggataggctttcaacggaagtgtttttatttttccgacgacactaaaaactggactagtagtcaacggttttgcgattctcaagatgcggatcttgcccaagtggagtccttccaagagttgaattttcttcttcgatataaaggtccttcagaccattggatagggttgtccagggaacagggacaaccgtggaagtggataaacggcacagaatggacccggcagttccctatattgggcgcgggcgagtgcgcttacctcaatgacaaaggcgcttcatctgccagacattacacggaacgaaagtggatctgtagtaagtccgatattcacgtcccaaataaggggtctgggactacatcagggaccacccggcttctctccggccatacatgcttcacactgacaggcttgttggggaccctcgtaactatgggtcttctgaca

SEQ ID NO: 460 - DNA, 705 bp, synthetic construct
  source 1..705: mol_type = other DNA
atggccctgcccgtgaccgccctgctgctgcccctggccctgctgctgcacgccgccaggccccgggccaattgtcatcaggaaccaagtgtgtgccttcaggccgcgtgtcctgaatcatggataggctttcaacggaagtgtttttatttttccgacgacactaaaaactggactagtagtcaacggttttgcgattctcaagatgcggatcttgcccaagtggagtccttccaagagttgaattttcttcttcgatataaaggtccttcagaccattggatagggttgtccagggaacagggacaaccgtggaagtggataaacggcacagaatggacccggcagttccctatattgggcgcgggcgagtgcgcttacctcaatgacaaaggcgcttcatctgccagacattacacggaacgaaagtggatctgtagtaagtccgatattcacgtcaccacgacgccagcgccgcgaccaccaacaccggcgcccaccatcgcgtcgcagcccctgtccctgcgcccagaggcgtgccggccagcggcggggggcgcagtgcacacgagggggctggacttcgcctgtgatccaaataaggggtctgggactacatcagggaccacccggcttctctccggccatacatgcttcacactgacaggcttgttggggaccctcgtaactatgggtcttctgaca

SEQ ID NO: 461 - protein, 132 aa, synthetic construct
RANCHQEPSVCLQAACPESWIGFQRKCFYFSDDTKNWTSSQRFCDSQDADLAQVESFQELNFLLRYKGPSDHWIGLSREQGQPWKWINGTEWTRQFPILGAGECAYLNDKGASSARHYTERKWICSKSDIHV

SEQ ID NO: 462 - protein, 132 aa, synthetic construct
VHIDSKSCIWKRETYHRASSAGKDNLYACEGAGLIPFQRTWETGNIWKWPQGQERSLGIWHDSPGKYRLLFNLEQFSEVQALDADQSDCFRQSSTWNKTDDSFYFCKRQFGIWSEPCAAQLCVSPEQHCNAR

SEQ ID NO: 463 - protein, 21 aa, synthetic construct
FFLIMFLTIIVCGMVAALSAI

SEQ ID NO: 464 - protein, 8 aa, synthetic construct
RVKFSRSA

SEQ ID NO: 465 - protein, 8 aa, synthetic construct
ASRSFKVR

SEQ ID NO: 466 - protein, 21 aa, synthetic construct
PFFFCCFIAVAMGIRFIIMVT

SEQ ID NO: 467 - protein, 24 aa, synthetic construct
IYIWAPLAGTCGVLLLSLVITLYC

SEQ ID NO: 468 - protein, 45 aa, synthetic construct
TTTPAPRPPTPAPTIASQPLSLRPEACRPAAGGAVHTRGLDFACD

SEQ ID NO: 469 - protein, 21 aa, synthetic construct
MALPVTALLLPLALLLHAARP

SEQ ID NO: 470 - protein, 22 aa, synthetic construct
MALIVLGGVAGLLLFIGLGIFF

SEQ ID NO: 471 - protein, 4 aa, synthetic construct
CVRC

SEQ ID NO: 472 - protein, 16 aa, synthetic construct
ELPTQGTFSNVSTNVS

SEQ ID NO: 473 - protein, 5 aa, synthetic construct
GGGGS

SEQ ID NO: 474 - protein, 37 aa, synthetic construct
PNKGSGTTSGTTRLLSGHTCFTLTGLLGTLVTMGLLT

SEQ ID NO: 475 - protein, 191 aa, Homo sapiens; identical to SEQ ID NO: 431

SEQ ID NO: 476 - RNA, 576 nt, Homo sapiens
  source 1..576: mol_type = genomic RNA
atgcatgacagtaacaatgtggagaaagacattacaccatctgaattgcctgcaaacccaggttgtctgcattcaaaagagcattctattaaagctaccttaatttggcgcttatttttcttaatcatgtttctgacaatcatagtgtgtggaatggttgctgctttaagcgcaataagagctaactgccatcaagagccatcagtatgtcttcaagctgcatgcccagaaagctggattggttttcaaagaaagtgtttctatttttctgatgacaccaagaactggacatcaagtcagaggttttgtgactcacaagatgctgatcttgctcaggttgaaagcttccaggaactgaatttcctgttgagatataaaggcccatctgatcactggattgggctgagcagagaacaaggccaaccatggaaatggataaatggtactgaatggacaagacagtttcctatcctgggagcaggagagtgtgcctatttgaatgacaaaggtgccagtagtgccaggcactacacagagaggaagtggatttgttccaaatcagatatacatgtctag

SEQ ID NO: 477 - protein, 163 aa, Homo sapiens [sequence omitted]

SEQ ID NO: 478 - RNA, 492 nt, Homo sapiens
  source 1..492: mol_type = other RNA
atgaagtggaaggcgcttttcaccgcggccatcctgcaggcacagttgccgattacagaggcacagagctttggcctgctggatcccaaactctgctacctgctggatggaatcctcttcatctatggtgtcattctcactgccttgttcctgagagtgaagttcagcaggagcgcagagccccccgcgtaccagcagggccagaaccagctctataacgagctcaatctaggacgaagagaggagtacgatgttttggacaagagacgtggccgggaccctgagatggggggaaagccgagaaggaagaaccctcaggaaggcctgtacaatgaactgcagaaagataagatggcggaggcctacagtgagattgggatgaaaggcgagcgccggaggggcaaggggcacgatggcctttaccagggtctcagtacagccaccaaggacacctacgacgcccttcacatgcaggccctgccccctcgctaa

SEQ ID NO: 479 - protein, 458 aa, Homo sapiens
MNRGVPFRHLLLVLQLALLPAATQGKKVVLGKKGDTVELTCTASQKKSIQFHWKNSNQIKILGNQGSFLTKGPSKLNDRADSRRSLWDQGNFPLIIKNLKIEDSDTYICEVEDQKEEVQLLVFGLTANSDTHLLQGQSLTLTLESPPGSSPSVQCRSPRGKNIQGGKTLSVSQLELQDSGTWTCTVLQNQKKVEFKIDIVVLAFQKASSIVYKKEGEQVEFSFPLAFTVEKLTGSGELWWQAERASSSKSWITFDLKNKEVSVKRVTQDPKLQMGKKLPLHLTLPQALPQYAGSGNLTLALEAKTGKLHQEVNLVVMRATQLQKNLTCEVWGPTSPKLMLSLKLENKEAKVSKREKAVWVLNPEAGMWQCLLSDSGQVLLESNIKVLPTWSTPVQPMALIVLGGVAGLLLFIGLGIFFCVRCRHRRRQAERMSQIKRLLSEKKTCQCPHRFQKTCSPI

SEQ ID NO: 480 - RNA, 1377 nt, Homo sapiens
  source 1..1377: mol_type = genomic RNA
atgaaccggggagtcccttttaggcacttgcttctggtgctgcaactggcgctcctcccagcagccactcagggaaagaaagtggtgctgggcaaaaaaggggatacagtggaactgacctgtacagcttcccagaagaagagcatacaattccactggaaaaactccaaccagataaagattctgggaaatcagggctccttcttaactaaaggtccatccaagctgaatgatcgcgctgactcaagaagaagcctttgggaccaaggaaacttccccctgatcatcaagaatcttaagatagaagactcagatacttacatctgtgaagtggaggaccagaaggaggaggtgcaattgctagtgttcggattgactgccaactctgacacccacctgcttcaggggcagagcctgaccctgaccttggagagcccccctggtagtagcccctcagtgcaatgtaggagtccaaggggtaaaaacatacagggggggaagaccctctccgtgtctcagctggagctccaggatagtggcacctggacatgcactgtcttgcagaaccagaagaaggtggagttcaaaatagacatcgtggtgctagctttccagaaggcctccagcatagtctataagaaagagggggaacaggtggagttctccttcccactcgcctttacagttgaaaagctgacgggcagtggcgagctgtggtggcaggcggagagggcttcctcctccaagtcttggatcacctttgacctgaagaacaaggaagtgtctgtaaaacgggttacccaggaccctaagctccagatgggcaagaagctcccgctccacctcaccctgccccaggccttgcctcagtatgctggctctggaaacctcaccctggcccttgaagcgaaaacaggaaagttgcatcaggaagtgaacctggtggtgatgagagccactcagctccagaaaaatttgacctgtgaggtgtggggacccacctcccctaagctgatgctgagcttgaaactggagaacaaggaggcaaaggtctcgaagcgggagaaggcggtgtgggtgctgaaccctgaggcggggatgtggcagtgtctgctgagtgactcgggacaggtcctgctggaatccaacatcaaggttctgcccacatggtccaccccggtgcagccaatggccctgattgtgctggggggcgtcgccggcctcctgcttttcattgggctaggcatcttcttctgtgtcaggtgccggcaccgaaggcgccaagcagagcggatgtctcagatcaagagactcctcagtgagaagaagacctgccagtgccctcaccggtttcagaagacatgtagccccatttga

SEQ ID NO: 481 - protein, 235 aa, Homo sapiens
MALPVTALLLPLALLLHAARPSQFRVSPLDRTWNLGETVELKCQVLLSNPTSGCSWLFQPRGAAASPTFLLYLSQNKPKAAEGLDTQRFSGKRLGDTFVLTLSDFRRENEGYYFCSALSNSIMYFSHFVPVFLPAKPTTTPAPRPPTPAPTIASQPLSLRPEACRPAAGGAVHTRGLDFACDIYIWAPLAGTCGVLLLSLVITLYCNHRNRRRVCKCPRPVVKSGDKPSLSARYV

SEQ ID NO: 482 - RNA, 708 nt, Homo sapiens
  source 1..708: mol_type = genomic RNA
atggccttaccagtgaccgccttgctcctgccgctggccttgctgctccacgccgccaggccgagccagttccgggtgtcgccgctggatcggacctggaacctgggcgagacagtggagctgaagtgccaggtgctgctgtccaacccgacgtcgggctgctcgtggctcttccagccgcgcggcgccgccgccagtcccaccttcctcctatacctctcccaaaacaagcccaaggcggccgaggggctggacacccagcggttctcgggcaagaggttgggggacaccttcgtcctcaccctgagcgacttccgccgagagaacgagggctactatttctgctcggccctgagcaactccatcatgtacttcagccacttcgtgccggtcttcctgccagcgaagcccaccacgacgccagcgccgcgaccaccaacaccggcgcccaccatcgcgtcgcagcccctgtccctgcgcccagaggcgtgccggccagcggcggggggcgcagtgcacacgagggggctggacttcgcctgtgatatctacatctgggcgcccttggccgggacttgtggggtccttctcctgtcactggttatcaccctttactgcaaccacaggaaccgaagacgtgtttgcaaatgtccccggcctgtggtcaaatcgggagacaagcccagcctttcggcgagatacgtctaa

SEQ ID NO: 483 - protein, 225 aa, Homo sapiens
MDQQAIYAELNLPTDSGPESSSPSSLPRDVCQGSPWHQFALKLSCAGIILLVLVVTGLSVSVTSLIQKSSIEKCSVDIQQSRNKTTERPGLLNCPIYWQQLREKCLLFSHTVNPWNNSLADCSTKESSLLLIRDKDELIHTQNLIRDKAILFWIGLNFSLSEKNWKWINGSFLNSNDLEIRGDAKENSCISISQTSVYSEYCSTEIRWICQKELTPVRNKVYPDS

SEQ ID NO: 484 - RNA, 678 nt, Homo sapiens
  source 1..678: mol_type = genomic RNA
atggaccaacaagcaatatatgctgagttaaacttacccacagactcaggcccagaaagttcttcaccttcatctcttcctcgggatgtctgtcagggttcaccttggcatcaatttgccctgaaacttagctgtgctgggattattctccttgtcttggttgttactgggttgagtgtttcagtgacatccttaatacagaaatcatcaatagaaaaatgcagtgtggacattcaacagagcaggaataaaacaacagagagaccgggtctcttaaactgcccaatatattggcagcaactccgagagaaatgcttgttattttctcacactgtcaacccttggaataacagtctagctgattgttccaccaaagaatccagcctgctgcttattcgagataaggatgaattgatacacacacagaacctgatacgtgacaaagcaattctgttttggattggattaaatttttcattatcagaaaagaactggaagtggataaacggctcttttttaaattctaatgacttagaaattagaggtgatgctaaagaaaacagctgtatttccatctcacagacatctgtgtattctgagtactgtagtacagaaatcagatggatctgccaaaaagaactaacacctgtgagaaataaagtgtatcctgactcttga

SEQ ID NO: 485 - protein, 216 aa, Homo sapiens
MGWIRGRRSRHSWEMSEFHNYNLDLKKSDFSTRWQKQRCPVVKSKCRENASPFFFCCFIAVAMGIRFIIMVTIWSAVFLNSLFNQEVQIPLTESYCGPCPKNWICYKNNCYQFFDESKNWYESQASCMSQNASLLKVYSKEDQDLLKLVKSYHWMGLVHIPTNGSWQWEDGSILSPNLLTIIEMQKGDCALYASSFKGYIENCSTPNTYICMQRTV

SEQ ID NO: 486 - RNA, 651 nt, Homo sapiens
  source 1..651: mol_type = genomic RNA
atggggtggattcgtggtcggaggtctcgacacagctgggagatgagtgaatttcataattataacttggatctgaagaagagtgatttttcaacacgatggcaaaagcaaagatgtccagtagtcaaaagcaaatgtagagaaaatgcatctccattttttttctgctgcttcatcgctgtagccatgggaatccgtttcattattatggtaacaatatggagtgctgtattcctaaactcattattcaaccaagaagttcaaattcccttgaccgaaagttactgtggcccatgtcctaaaaactggatatgttacaaaaataactgctaccaattttttgatgagagtaaaaactggtatgagagccaggcttcttgtatgtctcaaaatgccagccttctgaaagtatacagcaaagaggaccaggatttacttaaactggtgaagtcatatcattggatgggactagtacacattccaacaaatggatcttggcagtgggaagatggctccattctctcacccaacctactaacaataattgaaatgcagaagggagactgtgcactctatgcctcgagctttaaaggctatatagaaaactgttcaactccaaatacgtacatctgcatgcaaaggactgtgtaa

SEQ ID NO: 487 - protein, 20 aa, synthetic construct
METDTLLLWVLLLWVPGSTG

SEQ ID NO: 488 - protein, 15 aa, synthetic construct
GGGGSGGGGSGGGGS

SEQ ID NO: 489 - protein, 9 aa, synthetic construct
CPYSNPSLC

SEQ ID NO: 490 - protein, 17 aa, synthetic construct
PAKPTTTACPYSNPSLC

SEQ ID NO: 491 - protein, 16 aa, synthetic construct
PAKPTTTCPYSNPSLC

SEQ ID NO: 492 - protein, 23 aa, synthetic construct
IYIWAPLAGTCGVLLLSLVITLY

SEQ ID NO: 493 - protein, 50 aa, synthetic construct
  REGION 6..50: note = up to 9 copies of "GGGGS" may be deleted
GGGGSGGGGSGGGGSGGGGSGGGGSGGGGSGGGGSGGGGSGGGGSGGGGS

SEQ ID NO: 494-508 - skipped (15 entries)

SEQ ID NO: 509 - protein, 5 aa, synthetic construct
GGGGS

SEQ ID NO: 510 - protein, 6 aa, synthetic construct
SGGGGS

SEQ ID NO: 511 - protein, 42 aa, synthetic construct
PAPRPPTPAPTIASQPLSLRPEACRPAAGGAVHTRGLDFACD

SEQ ID NO: 512 - protein, 39 aa, synthetic construct
IEVMYPPPYLDNEKSNGTIIHVKGKHLCPSPLFPGPSKP

SEQ ID NO: 513-1034 - skipped (522 entries)

SEQ ID NO: 1035 - RNA, 20 nt, synthetic construct
  source 1..20: mol_type = other RNA
agacctggctatggtgagaa

SEQ ID NO: 1036 - RNA, 20 nt, synthetic construct
  source 1..20: mol_type = other RNA
gcactgcactataaagaacc

SEQ ID NO: 1037 - RNA, 20 nt, synthetic construct
  source 1..20: mol_type = other RNA
tagtgcagtgctggagttcg

SEQ ID NO: 1038 - RNA, 20 nt, synthetic construct
  source 1..20: mol_type = other RNA
agaaacctgtctggttctgt

SEQ ID NO: 1039 - RNA, 20 nt, synthetic construct
  source 1..20: mol_type = other RNA
tgatgttacctgcagggttg

SEQ ID NO: 1040 - RNA, 20 nt, synthetic construct
  source 1..20: mol_type = other RNA
ctgcaggtaacatcatgtct

SEQ ID NO: 1041 - RNA, 20 nt, synthetic construct
  source 1..20: mol_type = other RNA
accaggtatgttcatggagt

SEQ ID NO: 1042 - RNA, 20 nt, synthetic construct
  source 1..20: mol_type = other RNA
ttccagcaactgtggataca

SEQ ID NO: 1043 - RNA, 20 nt, synthetic construct
  source 1..20: mol_type = other RNA
tccacagttgctggaagtgc

SEQ ID NO: 1044 - RNA, 20 nt, synthetic construct
  source 1..20: mol_type = other RNA
ggtgctcacactagtggtcc

SEQ ID NO: 1045 - RNA, 20 nt, synthetic construct
  source 1..20: mol_type = other RNA
gggacctcacctccacagcc

SEQ ID NO: 1046 - RNA, 20 nt, synthetic construct
  source 1..20: mol_type = other RNA
ggacctcacctccacagcct

SEQ ID NO: 1047 - RNA, 20 nt, synthetic construct
  source 1..20: mol_type = other RNA
atacctgcctgtgcaggtag

SEQ ID NO: 1048 - RNA, 20 nt, synthetic construct
  source 1..20: mol_type = other RNA
gcttccatacctgcctgtgc

SEQ ID NO: 1049 - RNA, 20 nt, synthetic construct
  source 1..20: mol_type = other RNA
tcatctcaggtggctgcagt

SEQ ID NO: 1050 - RNA, 20 nt, synthetic construct
  source 1..20: mol_type = other RNA
ttcatctcaggtggctgcag

SEQ ID NO: 1051 - RNA, 20 nt, synthetic construct
  source 1..20: mol_type = other RNA
gtacctgtgtcatagccctg

SEQ ID NO: 1052 - RNA, 20 nt, synthetic construct
  source 1..20: mol_type = other RNA
gtctacctctgcagagcaaa

SEQ ID NO: 1053 - RNA, 20 nt, synthetic construct
  source 1..20: mol_type = other RNA
cgtctacctctgcagagcaa

SEQ ID NO: 1054 - RNA, 20 nt, synthetic construct
  source 1..20: mol_type = other RNA
ctgcagaggtagacgaggct

SEQ ID NO: 1055 - RNA, 20 nt, synthetic construct
  source 1..20: mol_type = other RNA
tctgcagaggtagacgaggc

SEQ ID NO: 1056 - RNA, 20 nt, synthetic construct
  source 1..20: mol_type = other RNA
ttgctctgcagaggtagacg

SEQ ID NO: 1057 - RNA, 20 nt, synthetic construct
  source 1..20: mol_type = other RNA
ctccacctgaggaaagacat

SEQ ID NO: 1058 - RNA, 20 nt, synthetic construct
  source 1..20: mol_type = other RNA
ctgactcacccaaaacagca

SEQ ID NO: 1059 - RNA, 20 nt, synthetic construct
  source 1..20: mol_type = other RNA
cacccaaaacagcaaggaca

SEQ ID NO: 1060 - RNA, 20 nt, synthetic construct
  source 1..20: mol_type = other RNA
cctacctgccaaaggagaag

SEQ ID NO: 1061 - RNA, 20 nt, synthetic construct
  source 1..20: mol_type = other RNA
ccccacagctcactgtctgc

SEQ ID NO: 1062 - RNA, 20 nt, synthetic construct
  source 1..20: mol_type = other RNA
cagacagtgagctgtggggt

SEQ ID NO: 1063 - RNA, 20 nt, synthetic construct
  source 1..20: mol_type = other RNA
ccccacctgtcttagtctcc

SEQ ID NO: 1064 - RNA, 20 nt, synthetic construct
  source 1..20: mol_type = other RNA
tcttaggggagctgaactca

SEQ ID NO: 1065 - RNA, 20 nt, synthetic construct
  source 1..20: mol_type = other RNA
tcccctaagaaggacagagc

SEQ ID NO: 1066 - RNA, 20 nt, synthetic construct
  source 1..20: mol_type = other RNA
atcaggtgagcgtgcatgta

SEQ ID NO: 1067 - RNA, 20 nt, synthetic construct
  source 1..20: mol_type = other RNA
tcttccaggtgctgcacttg

SEQ ID NO: 1068 - RNA, 20 nt, synthetic construct
  source 1..20: mol_type = other RNA
ctcttccaggtgctgcactt

SEQ ID NO: 1069 - RNA, 20 nt, synthetic construct
  source 1..20: mol_type = other RNA
cctcttccaggtgctgcact

SEQ ID NO: 1070 - RNA, 20 nt, synthetic construct
  source 1..20: mol_type = other RNA
cttccaggtgctgcacttgg

SEQ ID NO: 1071 - RNA, 20 nt, synthetic construct
  source 1..20: mol_type = other RNA
cagggtctggaaaacaggaa

SEQ ID NO: 1072 - RNA, 20 nt, synthetic construct
  source 1..20: mol_type = other RNA
agggtctggaaaacaggaat

SEQ ID NO: 1073 - RNA, 20 nt, synthetic construct
  source 1..20: mol_type = other RNA
ctttcaggcaccttgagcac

SEQ ID NO: 1074 - RNA, 20 nt, synthetic construct
  source 1..20: mol_type = other RNA
cctcacccacctggctgtgc

SEQ ID NO: 1075 - RNA, 20 nt, synthetic construct
  source 1..20: mol_type = other RNA
ctgcacaggtggtttcagtt

SEQ ID NO: 1076 - RNA, 20 nt, synthetic construct
  source 1..20: mol_type = other RNA
gctgcacaggtggtttcagt

SEQ ID NO: 1077 - RNA, 20 nt, synthetic construct
  source 1..20: mol_type = other RNA
ccacctgtgcagcagggaca

SEQ ID NO: 1078 - RNA, 20 nt, synthetic construct
  source 1..20: mol_type = other RNA
cacctgtgcagcagggacag

SEQ ID NO: 1079 - RNA, 20 nt, synthetic construct
  source 1..20: mol_type = other RNA
accacctgtgcagcagggac

SEQ ID NO: 1080 - RNA, 20 nt, synthetic construct
  source 1..20: mol_type = other RNA
tcctcagatgtaggggagaa

SEQ ID NO: 1081 - RNA, 20 nt, synthetic construct
  source 1..20: mol_type = other RNA
ttcctcagatgtaggggaga

SEQ ID NO: 1082 - RNA, 20 nt, synthetic construct
  source 1..20: mol_type = other RNA
tcgccgactgggtgctgctc

SEQ ID NO: 1083 - RNA, 20 nt, synthetic construct
  source 1..20: mol_type = other RNA
gtgctcttcccagacccatt

SEQ ID NO: 1084 - RNA, 20 nt, synthetic construct
  source 1..20: mol_type = other RNA
tgtgctcttcccagacccat

SEQ ID NO: 1085 - RNA, 20 nt, synthetic construct
  source 1..20: mol_type = other RNA
tgggtctgggaagagcacag

SEQ ID NO: 1086 - RNA, 20 nt, synthetic construct
  source 1..20: mol_type = other RNA
gtcgctgaccccctgacagc

SEQ ID NO: 1087 - RNA, 20 nt, synthetic construct
  source 1..20: mol_type = other RNA
tcagcgacaggcagtggcgt

SEQ ID NO: 1088 - RNA, 20 nt, synthetic construct
  source 1..20: mol_type = other RNA
ggataagtacacacggtttc

SEQ ID NO: 1089 - RNA, 20 nt, synthetic construct
  source 1..20: mol_type = other RNA
tcatccaggataagtacaca

SEQ ID NO: 1090 - RNA, 20 nt, synthetic construct
  source 1..20: mol_type = other RNA
gggcactggtggcatcatcc

SEQ ID NO: 1091 - RNA, 20 nt, synthetic construct
  source 1..20: mol_type = other RNA
gtttgcatccagggcactgg

SEQ ID NO: 1092 - RNA, 20 nt, synthetic construct
  source 1..20: mol_type = other RNA
catcacccagcacctcagcc

SEQ ID NO: 1093 - RNA, 20 nt, synthetic construct
  source 1..20: mol_type = other RNA
cacccagcacctcagcctgg

SEQ ID NO: 1094 - RNA, 19 nt, synthetic construct
  source 1..19: mol_type = other RNA
ggtggacgcggctttactg

SEQ ID NO: 1095 - RNA, 20 nt, synthetic construct
  source 1..20: mol_type = other RNA
tgcgggacagaaacaacgtc

SEQ ID NO: 1096 - RNA, 20 nt, synthetic construct
  source 1..20: mol_type = other RNA
ggacccgcgggtctcgtaca

SEQ ID NO: 1097 - RNA, 20 nt, synthetic construct
  source 1..20: mol_type = other RNA
catccaggatgaggacccgc

SEQ ID NO: 1098 - RNA, 20 nt, synthetic construct
  source 1..20: mol_type = other RNA
tcatccaggatgaggacccg

SEQ ID NO: 1099 - RNA, 20 nt, synthetic construct
  source 1..20: mol_type = other RNA
gcgggtcctcatcctggatg

SEQ ID NO: 1100 - RNA, 20 nt, synthetic construct
  source 1..20: mol_type = other RNA
gggcactagtagcctcatcc

SEQ ID NO: 1101 - RNA, 20 nt, synthetic construct
  source 1..20: mol_type = other RNA
cctagatgtgcagtgcgagc

SEQ ID NO: 1102 - RNA, 20 nt, synthetic construct
  source 1..20: mol_type = other RNA
actcacgctggatagcctcc

SEQ ID NO: 1103 - RNA, 20 nt, synthetic construct
  source 1..20: mol_type = other RNA
cacagcccaagatagttaag

SEQ ID NO: 1104 - RNA, 20 nt, synthetic construct
  source 1..20: mol_type = other RNA
acagcccaagatagttaagt

SEQ ID NO: 1105 - RNA, 20 nt, synthetic construct
  source 1..20: mol_type = other RNA
cagcccaagatagttaagtg

SEQ ID NO: 1106 - RNA, 20 nt, synthetic construct
  source 1..20: mol_type = other RNA
ttaccccacttaactatctt

SEQ ID NO: 1107 - RNA, 20 nt, synthetic construct
  source 1..20: mol_type = other RNA
cttaccccacttaactatct

SEQ ID NO: 1108 - RNA, 20 nt, synthetic construct
  source 1..20: mol_type = other RNA
tcgatctatgaaaaagacag

SEQ ID NO: 1109 - RNA, 19 nt, synthetic construct
  source 1..19: mol_type = other RNA
ctcacgctggatagcctcc

SEQ ID NO: 1110 - RNA, 18 nt, synthetic construct
  source 1..18: mol_type = other RNA
tcacgctggatagcctcc

SEQ ID NO: 1111 - RNA, 20 nt, synthetic construct
  source 1..20: mol_type = other RNA
cgcgagcacagctaaggcca

SEQ ID NO: 1112 - RNA, 20 nt, synthetic construct
  source 1..20: mol_type = other RNA
gagtagcgcgagcacagcta

SEQ ID NO: 1113 - RNA, 20 nt, synthetic construct
  source 1..20: mol_type = other RNA
gctactctctctttctggcc

SEQ ID NO: 1114 - RNA, 20 nt, synthetic construct
  source 1..20: mol_type = other RNA
cgtgagtaaacctgaatctt

SEQ ID NO: 1115 - RNA, 20 nt, synthetic construct
  source 1..20: mol_type = other RNA
tttgactttccattctctgc

SEQ ID NO: 1116 - RNA, 20 nt, synthetic construct
  source 1..20: mol_type = other RNA
acccagacacatagcaattc

SEQ ID NO: 1117 - RNA, 20 nt, synthetic construct
  source 1..20: mol_type = other RNA
aagtcaacttcaatgtcgga

SEQ ID NO: 1118 - RNA, 20 nt, synthetic construct
  source 1..20: mol_type = other RNA
cagtaagtcaacttcaatgt

SEQ ID NO: 1119 - RNA, 20 nt, synthetic construct
  source 1..20: mol_type = other RNA
gaagttgacttactgaagaa

SEQ ID NO: 1120 - RNA, 20 nt, synthetic construct
  source 1..20: mol_type = other RNA
tggagagagaattgaaaaag

SEQ ID NO: 1121 - RNA, 20 nt, synthetic construct
  source 1..20: mol_type = other RNA
ttcagacttgtctttcagca

SEQ ID NO: 1122 - RNA, 20 nt, synthetic construct
  source 1..20: mol_type = other RNA
acttgtctttcagcaaggac

SEQ ID NO: 1123 - RNA, 20 nt, synthetic construct
  source 1..20: mol_type = other RNA
atactcatctttttcagtgg

SEQ ID NO: 1124 - RNA, 20 nt, synthetic construct
  source 1..20: mol_type = other RNA
catactcatctttttcagtg

SEQ ID NO: 1125 - RNA, 20 nt, synthetic construct
  source 1..20: mol_type = other RNA
gcatactcatctttttcagt

SEQ ID NO: 1126 - RNA, 20 nt, synthetic construct
  source 1..20: mol_type = other RNA
ggcatactcatctttttcag

SEQ ID NO: 1127 - RNA, 20 nt, synthetic construct
  source 1..20: mol_type = other RNA
agtcacatggttcacacggc

SEQ ID NO: 1128 - RNA, 20 nt, synthetic construct
  source 1..20: mol_type = other RNA
acaaagtcacatggttcaca

SEQ ID NO: 1129 - RNA, 20 nt, synthetic construct
  source 1..20: mol_type = other RNA
tgggctgtgacaaagtcaca

SEQ ID NO: 1130 - RNA, 20 nt, synthetic construct
  source 1..20: mol_type = other RNA
aagcatgtgctccagaggtt

SEQ ID NO: 1131 - RNA, 20 nt, synthetic construct
  source 1..20: mol_type = other RNA
gaagcatgtgctccagaggt

SEQ ID NO: 1132 - RNA, 20 nt, synthetic construct
  source 1..20: mol_type = other RNA
ttcttacccagggtacaggg

SEQ ID NO: 1133 - RNA, 20 nt, synthetic construct
  source 1..20: mol_type = other RNA
ttcttacccagggtacaggg

SEQ ID NO: 1134 - RNA, 20 nt, synthetic construct
  source 1..20: mol_type = other RNA
cgaccagaagattgtagaat

SEQ ID NO: 1135 - RNA, 20 nt, synthetic construct
  source 1..20: mol_type = other RNA
tcgaccagaagattgtagaa

SEQ ID NO: 1136 - RNA, 20 nt, synthetic construct
  source 1..20: mol_type = other RNA
aatcccattctacaatcttc

SEQ ID NO: 1137 - RNA, 20 nt, synthetic construct
  source 1..20: mol_type = other RNA
tgcaatccattctactccaa

SEQ ID NO: 1138 - RNA, 20 nt, synthetic construct
  source 1..20: mol_type = other RNA
ggtccatgaggagccagccc

SEQ ID NO: 1139 - RNA, 20 nt, synthetic construct
  source 1..20: mol_type = other RNA
tgcagggttcaccagccagc

SEQ ID NO: 1140 - RNA, 20 nt, synthetic construct
  source 1..20: mol_type = other RNA
cgaaaactgcgaggagacca

SEQ ID NO: 1141 - RNA, 20 nt, synthetic construct
  source 1..20: mol_type = other RNA
aggctgcaagattgtggcaa

SEQ ID NO: 1142 - RNA, 20 nt, synthetic construct
  source 1..20: mol_type = other RNA
tgccagagctccagacctgc

SEQ ID NO: 1143 - RNA, 20 nt, synthetic construct
  source 1..20: mol_type = other RNA
atactcactccacttcctcc

SEQ ID NO: 1144 - RNA, 20 nt, synthetic construct
  source 1..20: mol_type = other RNA
atactcactccacttcctcc

SEQ ID NO: 1145 - RNA, 20 nt, synthetic construct
  source 1..20: mol_type = other RNA
aggctgtggagagcaggaga

SEQ ID NO: 1146 - RNA, 20 nt, synthetic construct
  source 1..20: mol_type = other RNA
tccacagcctcagtaacaac

SEQ ID NO: 1147 - RNA, 20 nt, synthetic construct
  source 1..20: mol_type = other RNA
gcaggctgtgaagacaaaag

SEQ ID NO: 1148 - RNA, 20 nt, synthetic construct
  source 1..20: mol_type = other RNA
caggctgtgaagacaaaaga

SEQ ID NO: 1149 - RNA, 20 nt, synthetic construct
  source 1..20: mol_type = other RNA
gccctggagggacatcacca

SEQ ID NO: 1150 - RNA, 20 nt, synthetic construct
  source 1..20: mol_type = other RNA
ctgggcaggctgacacattg

SEQ ID NO: 1151 - RNA, 20 nt, synthetic construct
  source 1..20: mol_type = other RNA
atctccagcctcagtgagaa

SEQ ID NO: 1152 - RNA, 20 nt, synthetic construct
  source 1..20: mol_type = other RNA
actgaggctggagatcacag

SEQ ID NO: 1153 - RNA, 20 nt, synthetic construct
  source 1..20: mol_type = other RNA
acgctcacctgatgtccaag

SEQ ID NO: 1154 - RNA, 20 nt, synthetic construct
  source 1..20: mol_type = other RNA
acgctcacctgatgtccaag

SEQ ID NO: 1155 - RNA, 20 nt, synthetic construct
  source 1..20: mol_type = other RNA
cctagggatatgtgggccac

SEQ ID NO: 1156 - RNA, 20 nt, synthetic construct
  source 1..20: mol_type = other RNA
ctgaggctgcaaaggggcaa

SEQ ID NO: 1157 - RNA, 20 nt, synthetic construct
  source 1..20: mol_type = other RNA
gacaatctgtgaaacaaagc

SEQ ID NO: 1158 - RNA, 20 nt, synthetic construct
  source 1..20: mol_type = other RNA
ccttttcaggctgagccaga

SEQ ID NO: 1159 - RNA, 20 nt, synthetic construct
  source 1..20: mol_type = other RNA
cttttcaggctgagccagac

SEQ ID NO: 1160 - RNA, 20 nt, synthetic construct
  source 1..20: mol_type = other RNA
gacctggatcagacaggacc

SEQ ID NO: 1161 - RNA, 20 nt, synthetic construct
  source 1..20: mol_type = other RNA
caacttactccacctggctg

SEQ ID NO: 1162 - RNA, 20 nt, synthetic construct
  source 1..20: mol_type = other RNA
caacttactccacctggctg

SEQ ID NO: 1163 - RNA, 20 nt, synthetic construct
  source 1..20: mol_type = other RNA
cttacttcactgaggcctcc

SEQ ID NO: 1164 - RNA, 20 nt, synthetic construct
  source 1..20: mol_type = other RNA
cttacttcactgaggcctcc

SEQ ID NO: 1165 - RNA, 20 nt, synthetic construct
  source 1..20: mol_type = other RNA
gctcacccaaagccacagcg

SEQ ID NO: 1166 - RNA, 20 nt, synthetic construct
  source 1..20: mol_type = other RNA
gctcacccaaagccacagcg

SEQ ID NO: 1167 - RNA, 20 nt, synthetic construct
  source 1..20: mol_type = other RNA
gctcttacctgctacctcca

SEQ ID NO: 1168 - RNA, 20 nt, synthetic construct
  source 1..20: mol_type = other RNA
gctcttacctgctacctcca

SEQ ID NO: 1169 - RNA, 20 nt, synthetic construct
  source 1..20: mol_type = other RNA
aaagacctggcaggcagaag

SEQ ID NO: 1170 - RNA, 20 nt, synthetic construct
  source 1..20: mol_type = other RNA
gaaccaacactcgatcaccg

SEQ ID NO: 1171 - RNA, 20 nt, synthetic construct
  source 1..20: mol_type = other RNA
gctggcccatttcgcagagg

SEQ ID NO: 1172 - RNA, 20 nt, synthetic construct
  source 1..20: mol_type = other RNA
ctggcccatttcgcagaggc

SEQ ID NO: 1173 - RNA, 20 nt, synthetic construct
  source 1..20: mol_type = other RNA
accacagccagagcctcagc

SEQ ID NO: 1174 - RNA, 20 nt, synthetic construct
  source 1..20: mol_type = other RNA
actgggacaagatgctctgc

SEQ ID NO: 1175 - RNA, 20 nt, synthetic construct
  source 1..20: mol_type = other RNA
cgtcgccactctagcccaaa

SEQ ID NO: 1176 - RNA, 20 nt, synthetic construct
  source 1..20: mol_type = other RNA
gcgacgccagcacctgggta

SEQ ID NO: 1177 - RNA, 20 nt, synthetic construct
  source 1..20: mol_type = other RNA
cgacgccagcacctgggtaa

SEQ ID NO: 1178 - RNA, 20 nt, synthetic construct
  source 1..20: mol_type = other RNA
atcccaagcagcaaatgcca

SEQ ID NO: 1179 - RNA, 20 nt, synthetic construct
  source 1..20: mol_type = other RNA
acagttcaaccctttcagga

SEQ ID NO: 1180 - RNA, 20 nt, synthetic construct
  source 1..20: mol_type = other RNA
ctttcaggagggcacctatc

SEQ ID NO: 1181 - RNA, 20 nt, synthetic construct
  source 1..20: mol_type = other RNA
cctgcaaggacaggtcaccc

SEQ ID NO: 1182 - RNA, 20 nt, synthetic construct
  source 1..20: mol_type = other RNA
cgagagccacctctgcccct

SEQ ID NO: 1183 - RNA, 20 nt, synthetic construct
  source 1..20: mol_type = other RNA
aactggcatggcccgagcca

SEQ ID NO: 1184 - RNA, 20 nt, synthetic construct
  source 1..20: mol_type = other RNA
cactcaccggttcctggggg

SEQ ID NO: 1185 - RNA, 20 nt, synthetic construct
  source 1..20: mol_type = other RNA
cactcaccggttcctggggg

SEQ ID NO: 1186 - RNA, 20 nt, synthetic construct
  source 1..20: mol_type = other RNA
cgcaggggacgtcgtcgtgc

SEQ ID NO: 1187 - RNA, 20 nt, synthetic construct
  source 1..20: mol_type = other RNA
cacactcacagtacacggtg

SEQ ID NO: 1188 - RNA, 20 nt, synthetic construct
  source 1..20: mol_type = other RNA
cacactcacagtacacggtg

SEQ ID NO: 1189 - RNA, 20 nt, synthetic construct
  source 1..20: mol_type = other RNA
tggtcctgggagagacagaa

SEQ ID NO: 1190 - RNA, 20 nt, synthetic construct
  source 1..20: mol_type = other RNA
ttcctcacctttgacctgga

SEQ ID NO: 1191 - RNA, 20 nt, synthetic construct
  source 1..20: mol_type = other RNA
ttcctcacctttgacctgga

SEQ ID NO: 1192 - RNA, 20 nt, synthetic construct
  source 1..20: mol_type = other RNA
cctacaggtgcccaacatgg

SEQ ID NO: 1193 - RNA, 20 nt, synthetic construct
  source 1..20: mol_type = other RNA
tgtcacagctgacttgggcg

SEQ ID NO: 1194 - RNA, 20 nt, synthetic construct
  source 1..20: mol_type = other RNA
aacgcagggccccagctatt

SEQ ID NO: 1195 - RNA, 20 nt, synthetic construct
  source 1..20: mol_type = other RNA
cccgcagggcagcaggagcg

SEQ ID NO: 1196 - RNA, 20 nt, synthetic construct
  source 1..20: mol_type = other RNA
gagtgccaggtgatttgggc

SEQ ID NO: 1197 - RNA, 20 nt, synthetic construct
  source 1..20: mol_type = other RNA
cggggccatggggctgggcc

SEQ ID NO: 1198 - RNA, 20 nt, synthetic construct
  source 1..20: mol_type = other RNA
tcaccagcagcagctcccgg

SEQ ID NO: 1199 - RNA, 20 nt, synthetic construct
  source 1..20: mol_type = other RNA
tcaccagcagcagctcccgg

SEQ ID NO: 1200 - RNA, 20 nt, synthetic construct
  source 1..20: mol_type = other RNA
cactcaccagcagcagctcc

SEQ ID NO: 1201 - RNA, 20 nt, synthetic construct
  source 1..20: mol_type = other RNA
cactcaccagcagcagctcc

SEQ ID NO: 1202 - RNA, 20 nt, synthetic construct
  source 1..20: mol_type = other RNA
ggcaggcttgcattccctcc

SEQ ID NO: 1203 - RNA, 20 nt, synthetic construct
  source 1..20: mol_type = other RNA
ggcaggcttgcattccctcc

SEQ ID NO: 1204 - RNA, 20 nt, synthetic construct
  source 1..20: mol_type = other RNA
cgtcggtacctgttctcctc

SEQ ID NO: 1205 - RNA, 20 nt, synthetic construct
  source 1..20: mol_type = other RNA
cgtcggtacctgttctcctc

SEQ ID NO: 1206 - RNA, 20 nt, synthetic construct
  source 1..20: mol_type = other RNA
ttcttctccagtgcccccca

SEQ ID NO: 1207 - RNA, 20 nt, synthetic construct
  source 1..20: mol_type = other RNA
taggctcaccagagggcaca

SEQ ID NO: 1208 - RNA, 20 nt, synthetic construct
  source 1..20: mol_type = other RNA
taggctcaccagagggcaca

SEQ ID NO: 1209 - RNA, 20 nt, synthetic construct
  source 1..20: mol_type = other RNA
ctgtccattcctcagtctcc

SEQ ID NO: 1210 - RNA, 20 nt, synthetic construct
  source 1..20: mol_type = other RNA
tgtcccatgtcttatttccc

SEQ ID NO: 1211 - RNA, 20 nt, synthetic construct
  source 1..20: mol_type = other RNA
cccgccttctaaatctcccc

SEQ ID NO: 1212 - RNA, 20 nt, synthetic construct
  source 1..20: mol_type = other RNA
ggaattttctcttccaagcg

SEQ ID NO: 1213 - RNA, 20 nt, synthetic construct
  source 1..20: mol_type = other RNA
aagagaaaattccagtgggc

SEQ ID NO: 1214 - RNA, 20 nt, synthetic construct
  source 1..20: mol_type = other RNA
ggagagggcggggccacgct

SEQ ID NO: 1215 - RNA, 20 nt, synthetic construct
  source 1..20: mol_type = other RNA
ccgccctctccgctcgtgat

SEQ ID NO: 1216 - RNA, 20 nt, synthetic construct
  source 1..20: mol_type = other RNA
agggccaatcacgagcggag

SEQ ID NO: 1217 - RNA, 20 nt, synthetic construct
  source 1..20: mol_type = other RNA
tcgtgattggccctaagttc

SEQ ID NO: 1218 - RNA, 20 nt, synthetic construct
  source 1..20: mol_type = other RNA
aggggccatggggctgggcc

SEQ ID NO: 1219 - RNA, 20 nt, synthetic construct
  source 1..20: mol_type = other RNA
actcaccagcggcggctgcc

SEQ ID NO: 1220 - RNA, 20 nt, synthetic construct
  source 1..20: mol_type = other RNA
actcaccagcggcggctgcc

SEQ ID NO: 1221 - RNA, 20 nt, synthetic construct
  source 1..20: mol_type = other RNA
ctcaccagcggcggctgccg

SEQ ID NO: 1222 - RNA, 20 nt, synthetic construct
  source 1..20: mol_type = other RNA
ctcaccagcggcggctgccg

SEQ ID NO: 1223 - RNA, 20 nt, synthetic construct
  source 1..20: mol_type = other RNA
cactcaccagcggcggctgc

SEQ ID NO: 1224 - RNA, 20 nt, synthetic construct
  source 1..20: mol_type = other RNA
cactcaccagcggcggctgc

SEQ ID NO: 1225 - RNA, 20 nt, synthetic construct
  source 1..20: mol_type = other RNA
ctacagcgatatctgaaatc

SEQ ID NO: 1226 - RNA, 20 nt, synthetic construct
  source 1..20: mol_type = other RNA
gtcggtacctgttctcctga

SEQ ID NO: 1227 - RNA, 20 nt, synthetic construct
  source 1..20: mol_type = other RNA
gtcggtacctgttctcctga

SEQ ID NO: 1228 - RNA, 20 nt, synthetic construct
  source 1..20: mol_type = other RNA
caggctcaccagagggcaca

SEQ ID NO: 1229 - RNA, 20 nt, synthetic construct
  source 1..20: mol_type = other RNA
caggctcaccagagggcaca

SEQ ID NO: 1230 - RNA, 20 nt, synthetic construct
  source 1..20: mol_type = other RNA
gaggcgcatggcggcgaggt

SEQ ID NO: 1231 - RNA, 20 nt, synthetic construct
  source 1..20: mol_type = other RNA
gaggcgcatggcggcgaggt

SEQ ID NO: 1232 - RNA, 20 nt, synthetic construct
  source 1..20: mol_type = other RNA
cgcatggcggcgaggtgggg

SEQ ID NO: 1233 - RNA, 20 nt, synthetic construct
  source 1..20: mol_type = other RNA
cgcatggcggcgaggtgggg

SEQ ID NO: 1234 - RNA, 20 nt, synthetic construct
  source 1..20: mol_type = other RNA
aggcgcatggcggcgaggtg

SEQ ID NO: 1235 - RNA, 20 nt, synthetic construct
  source 1..20: mol_type = other RNA
aggcgcatggcggcgaggtg

SEQ ID NO: 1236 - RNA, 20 nt, synthetic construct
  source 1..20: mol_type = other RNA
ttcccacagggtaatgatgg

SEQ ID NO: 1237 - RNA, 20 nt, synthetic construct
  source 1..20: mol_type = other RNA
acgcctacaattggaaaaca

SEQ ID NO: 1238 - RNA, 20 nt, synthetic construct
  source 1..20: mol_type = other RNA
cgcctacaattggaaaacaa

SEQ ID NO: 1239 - RNA, 20 nt, synthetic construct
  source 1..20: mol_type = other RNA
caattgtaggcgtgatggga

SEQ ID NO: 1240 - RNA, 20 nt, synthetic construct
  source 1..20: mol_type = other RNA
tgctgagctgttaataaaac

SEQ ID NO: 1241 - RNA, 20 nt, synthetic construct
  source 1..20: mol_type = other RNA
acttaccctctgacttcata

SEQ ID NO: 1242 - RNA, 20 nt, synthetic construct
  source 1..20: mol_type = other RNA
acttaccctctgacttcata

SEQ ID NO: 1243 - RNA, 20 nt, synthetic construct
  source 1..20: mol_type = other RNA
tcacttacttcatatttctt

SEQ ID NO: 1244 - RNA, 20 nt, synthetic construct
  source 1..20: mol_type = other RNA
tcacttacttcatatttctt

SEQ ID NO: 1245 - RNA, 22 nt, synthetic construct
  source 1..22: mol_type = other RNA
cattctttacgggccgcctcac

SEQ ID NO: 1246 - RNA, 22 nt, synthetic construct
  source 1..22: mol_type = other RNA
tttacgggccgcctcactgact

SEQ ID NO: 1247 - RNA, 22 nt, synthetic construct
  source 1..22: mol_type = other RNA
tacaagatggctcagccgatac

SEQ ID NO: 1248 - RNA, 22 nt, synthetic construct
  source 1..22: mol_type = other RNA
tcaccatagccaggtctggggg

SEQ ID NO: 1249 - RNA, 22 nt, synthetic construct
  source 1..22: mol_type = other RNA
tctgagtgagaatctgagctta

SEQ ID NO: 1250 - RNA, 22 nt, synthetic construct
  source 1..22: mol_type = other RNA
tcactcagagaatcactcaggg

SEQ ID NO: 1251 - RNA, 22 nt, synthetic construct
  source 1..22: mol_type = other RNA
ctgtggtacctggtgcgaggcc

SEQ ID NO: 1252 - RNA, 22 nt, synthetic construct
  source 1..22: mol_type = other RNA
tcccaccttcttgggcagaagg

SEQ ID NO: 1253 - RNA, 22 nt, synthetic construct
  source 1..22: mol_type = other RNA
ccgcacctgcacttccagcaac

SEQ ID NO: 1254 - RNA, 22 nt, synthetic construct
  source 1..22: mol_type = other RNA
aggctctgtcggccatgcctac

SEQ ID NO: 1255 - RNA, 22 nt, synthetic construct
  source 1..22: mol_type = other RNA
gtggggacactgctgctcccgc

SEQ ID NO: 1256 - RNA, 22 nt, synthetic construct
  source 1..22: mol_type = other RNA
atccctcactattctggtcgtg

SEQ ID NO: 1257 - RNA, 22 nt, synthetic construct
  source 1..22: mol_type = other RNA
tggtcgtgtgattgacatcctg

SEQ ID NO: 1258 - RNA, 22 nt, synthetic construct
  source 1..22: mol_type = other RNA
tgacccccatgcctttgccagt

SEQ ID NO: 1259 - RNA, 22 nt, synthetic construct
  source 1..22: mol_type = other RNA
gagacatggtgtaggtgaagca

SEQ ID NO: 1260 - RNA, 22 nt, synthetic construct
  source 1..22: mol_type = other RNA
aaaggaagccagttactcatca

SEQ ID NO: 1261 - RNA, 22 nt, synthetic construct
  source 1..22: mol_type = other RNA
tgaagggcatgtgcagcagaga

SEQ ID NO: 1262 - RNA, 22 nt, synthetic construct
  source 1..22: mol_type = other RNA
ttcaagggcctctttatagcga

SEQ ID NO: 1263 - RNA, 22 nt, synthetic construct
  source 1..22: mol_type = other RNA
ggctgtcggtccatgtaggaga

SEQ ID NO: 1264 - RNA, 22 nt, synthetic construct
  source 1..22: mol_type = other RNA
cacaaccccctgcagagtggtg

SEQ ID NO: 1265 - RNA, 20 nt, synthetic construct
  source 1..20: mol_type = other RNA
tgacggccatcctcggcgtc

SEQ ID NO: 1266 - RNA, 20 nt, synthetic construct
  source 1..20: mol_type = other RNA
gacggccatcctcggcgtct

SEQ ID NO: 1267 - RNA, 20 nt, synthetic construct
  source 1..20: mol_type = other RNA
acggccatcctcggcgtctg

SEQ ID NO: 1268 - RNA, 20 nt, synthetic construct
  source 1..20: mol_type = other RNA
cgcactcacccgcccaggtc

SEQ ID NO: 1269 - RNA, 20 nt, synthetic construct
  source 1..20: mol_type = other RNA
gcactcacccgcccaggtct

SEQ ID NO: 1270 - RNA, 19 nt, synthetic construct
  source 1..19: mol_type = other RNA
cccaggctcgcactccatg

SEQ ID NO: 1271 - RNA, 20 nt, synthetic construct
  source 1..20: mol_type = other RNA
gtcactcaccggcctcgctc

SEQ ID NO: 1272 - RNA, 20 nt, synthetic construct
  source 1..20: mol_type = other RNA
ccttaccccatctcagggtg

SEQ ID NO: 1273 - RNA, 20 nt, synthetic construct
  source 1..20: mol_type = other RNA
cttaccccatctcagggtga

SEQ ID NO: 1274 - RNA, 20 nt, synthetic construct
  source 1..20: mol_type = other RNA
ggctctgggaaaagagggga

SEQ ID NO: 1275 - RNA, 20 nt, synthetic construct
  source 1..20: mol_type = other RNA
cttcccacagatagaaaagg

SEQ ID NO: 1276 - RNA, 20 nt, synthetic construct
  source 1..20: mol_type = other RNA
ttcccacagatagaaaagga

SEQ ID NO: 1277 - RNA, 20 nt, synthetic construct
  source 1..20: mol_type = other RNA
cccaggcagtgacagtgccc

SEQ ID NO: 1278 - RNA, 20 nt, synthetic construct
  source 1..20: mol_type = other RNA
ccaggcagtgacagtgccca

SEQ ID NO: 1279 - RNA, 20 nt, synthetic construct
  source 1..20: mol_type = other RNA
gacccgcatctcggcgtctg

SEQ ID NO: 1280 - RNA, 20 nt, synthetic construct
  source 1..20: mol_type = other RNA
gcactcaccggcccaggtct

SEQ ID NO: 1281 - RNA, 20 nt, synthetic construct
  source 1..20: mol_type = other RNA
tgggagcctgggggcgagga

SEQ ID NO: 1282 - RNA, 20 nt, synthetic construct
  source 1..20: mol_type = other RNA
gggagcctgggggcgaggag

SEQ ID NO: 1283 - RNA, 20 nt, synthetic construct
  source 1..20: mol_type = other RNA
ccccaggctcccactccatg

SEQ ID NO: 1284 - RNA, 20 nt, synthetic construct
  source 1..20: mol_type = other RNA
ttaccccatctcagggtgag

SEQ ID NO: 1285 - RNA, 20 nt, synthetic construct
  source 1..20: mol_type = other RNA
ttcccacaggtggaaaagga

SEQ ID NO: 1286 - RNA, 20 nt, synthetic construct
  source 1..20: mol_type = other RNA
tgacccgcatctcggcgtct

SEQ ID NO: 1287 - RNA, 20 nt, synthetic construct
  source 1..20: mol_type = other RNA
gcactcacaggcccaggtct

SEQ ID NO: 1288 - RNA, 20 nt, synthetic construct
  source 1..20: mol_type = other RNA
cacaggcccaggtctcggtc

SEQ ID NO: 1289 - RNA, 20 nt, synthetic construct
  source 1..20: mol_type = other RNA
agaccctggccccgcccccg

SEQ ID NO: 1290 - RNA, 20 nt, synthetic construct
  source 1..20: mol_type = other RNA
ggctctgggaaaggagggga

SEQ ID NO: 1291 - RNA, 20 nt, synthetic construct
  source 1..20: mol_type = other RNA
cccagccagcaacagtgccc

SEQ ID NO: 1292 - RNA, 22 nt, synthetic construct
  source 1..22: mol_type = other RNA
ggaccgggagacacagaagtac

SEQ ID NO: 1293 - RNA, 22 nt, synthetic construct
  source 1..22: mol_type = other RNA
catcgccctgaacgaggacctg

SEQ ID NO: 1294 - RNA, 22 nt, synthetic construct
  source 1..22: mol_type = other RNA
catcgccctgaacgaggatctg

SEQ ID NO: 1295 - RNA, 22 nt, synthetic construct
  source 1..22: mol_type = other RNA
ttgctggcctggctgtcctagc

SEQ ID NO: 1296 - RNA, 22 nt, synthetic construct
  source 1..22: mol_type = other RNA
catcgccctgaacgaggacctg

SEQ ID NO: 1297 - RNA, 20 nt, synthetic construct
  source 1..20: mol_type = other RNA
cgggccatggagggcccggg

SEQ ID NO: 1298 - RNA, 20 nt, synthetic construct
  source 1..20: mol_type = other RNA
gggccatggagggcccggga

SEQ ID NO: 1299 - RNA, 20 nt, synthetic construct
  source 1..20: mol_type = other RNA
ggccatggagggcccgggag

SEQ ID NO: 1300 - RNA, 20 nt, synthetic construct
  source 1..20: mol_type = other RNA
ctcacctatgactctgagcc

SEQ ID NO: 1301 - RNA, 20 nt, synthetic construct
  source 1..20: mol_type = other RNA
ttggctggggagaggaggag

SEQ ID NO: 1302 - RNA, 20 nt, synthetic construct
  source 1..20: mol_type = other RNA
tggctggggagaggaggaga

SEQ ID NO: 1303 - RNA, 20 nt, synthetic construct
  source 1..20: mol_type = other RNA
tacactcacagcgtacagag

SEQ ID NO: 1304 - RNA, 20 nt, synthetic construct
  source 1..20: mol_type = other RNA
acactcacagcgtacagaga

SEQ ID NO: 1305 - RNA, 20 nt, synthetic construct
  source 1..20: mol_type = other RNA
ggagggtctgggggaaatgg

SEQ ID NO: 1306 - RNA, 20 nt, synthetic construct
  source 1..20: mol_type = other RNA
gagggtctgggggaaatggg

SEQ ID NO: 1307 - RNA, 20 nt, synthetic construct
  source 1..20: mol_type = other RNA
caggctgtggggtaggaggt

SEQ ID NO: 1308 - RNA, 20 nt, synthetic construct
  source 1..20: mol_type = other RNA
gggctgtagtgggagagggg

SEQ ID NO: 1309 - RNA, 20 nt, synthetic construct
  source 1..20: mol_type = other RNA
ggagggctgtagtgggagag

SEQ ID NO: 1310 - RNA, 20 nt, synthetic construct
  source 1..20: mol_type = other RNA
tcctacctgctcagtgcatg

SEQ ID NO: 1311 - RNA, 20 nt, synthetic construct
  source 1..20: mol_type = other RNA
catttcctggaggtagagag

SEQ ID NO: 1312 - RNA, 20 nt, synthetic construct
  source 1..20: mol_type = other RNA
gcaaccatggctcgtcgggc

SEQ ID NO: 1313 - RNA, 20 nt, synthetic construct
  source 1..20: mol_type = other RNA
actcaccaaagcagtgcagc

SEQ ID NO: 1314 - RNA, 20 nt, synthetic construct
  source 1..20: mol_type = other RNA
ctcaccgctgcttgggatac

SEQ ID NO: 1315 - RNA, 20 nt, synthetic construct
  source 1..20: mol_type = other RNA
accgcccagacccggagcag

SEQ ID NO: 1316 - RNA, 20 nt, synthetic construct
  source 1..20: mol_type = other RNA
gcggggtctgagtgtagaga

SEQ ID NO: 1317 - RNA, 20 nt, synthetic construct
  source 1..20: mol_type = other RNA
gaggtccagggtctcaggtc

SEQ ID NO: 1318 - RNA, 20 nt, synthetic construct
  source 1..20: mol_type = other RNA
gtagaatccagtcagtgagg

SEQ ID NO: 1319 - RNA, 20 nt, synthetic construct
  source 1..20: mol_type = other RNA
gaaccaacactcgatcaccg

SEQ ID NO: 1320 - RNA, 20 nt, synthetic construct
  source 1..20: mol_type = other RNA
aggtccagggtctcaggtca

SEQ ID NO: 1321 - RNA, 20 nt, synthetic construct
  source 1..20: mol_type = other RNA
gctcacccaaagccacagcg

SEQ ID NO: 1322 - RNA, 20 nt, synthetic construct
  source 1..20: mol_type = other RNA
cacccagcacctcagcctgg

SEQ ID NO: 1323 - RNA, 20 nt, synthetic construct
  source 1..20: mol_type = other RNA
aagccagttactcatcaggg

SEQ ID NO: 1324 - RNA, 20 nt, synthetic construct
  source 1..20: mol_type = other RNA
actcacgctggatagcctcc

SEQ ID NO: 1325 - RNA, 20 nt, synthetic construct
  source 1..20: mol_type = other RNA
tgttccgagagctgatctca

SEQ ID NO: 1326 - RNA, 20 nt, synthetic construct
  source 1..20: mol_type = other RNA
cccctggagaaagagaagag

SEQ ID NO: 1327 - RNA, 20 nt, synthetic construct
  source 1..20: mol_type = other RNA
ccctccaggctgccttcagg

SEQ ID NO: 1328 - RNA, 20 nt, synthetic construct
  source 1..20: mol_type = other RNA
ctccacctgaggaaagacat

SEQ ID NO: 1329 - RNA, 20 nt, synthetic construct
  source 1..20: mol_type = other RNA
ttccgagagctgatctcatg

SEQ ID NO: 1330 - RNA, 20 nt, synthetic construct
  source 1..20: mol_type = other RNA
aagtcaacttcaatgtcgga

SEQ ID NO: 1331 - RNA, 20 nt, synthetic construct
  source 1..20: mol_type = other RNA
gcacctgtccccctgtgggc

SEQ ID NO: 1332 - RNA, 20 nt, synthetic construct
  source 1..20: mol_type = other RNA
ctccccatgagatcagctct

SEQ ID NO: 1333 - RNA, 20 nt, synthetic construct
  source 1..20: mol_type = other RNA
ggactctccgcgccccggtg

SEQ ID NO: 1334 - RNA, 20 nt, synthetic construct
  source 1..20: mol_type = other RNA
tggcccatttcgcagaggcg

SEQ ID NO: 1335 - RNA, 20 nt, synthetic construct
  source 1..20: mol_type = other RNA
ggatttgcctagcttcccca

SEQ ID NO: 1336 - RNA, 20 nt, synthetic construct
  source 1..20: mol_type = other RNA
ctggcccatttcgcagaggc

SEQ ID NO: 1337 - RNA, 20 nt, synthetic construct
  source 1..20: mol_type = other RNA
tcgatctatgaaaaagacag

SEQ ID NO: 1338 - RNA, 20 nt, synthetic construct
  source 1..20: mol_type = other RNA
gacccagaagccaactatgg

SEQ ID NO: 1339 - RNA, 20 nt, synthetic construct
  source 1..20: mol_type = other RNA
ttgtgccacagggctgctgc

SEQ ID NO: 1340 - RNA, 20 nt, synthetic construct
  source 1..20: mol_type = other RNA
gtacctgtgtcatagccctg

SEQ ID NO: 1341 - RNA, 20 nt, synthetic construct
  source 1..20: mol_type = other RNA
cctacctgccaaaggagaag

SEQ ID NO: 1342 - RNA, 100 nt, synthetic construct
  source 1..100: mol_type = other RNA
agacctggctatggtgagaagttttagagctagaaatagcaagttaaaataaggctagtccgttatcaacttgaaaaagtggcaccgagtcggtgctttt

SEQ ID NO: 1343 - RNA, 100 nt, synthetic construct
  source 1..100: mol_type = other RNA
gcactgcactataaagaaccgttttagagctagaaatagcaagttaaaataaggctagtccgttatcaacttgaaaaagtggcaccgagtcggtgctttt

SEQ ID NO: 1344 - RNA, 100 nt, synthetic construct
  source 1..100: mol_type = other RNA
tagtgcagtgctggagttcggttttagagctagaaatagcaagttaaaataaggctagtccgttatcaacttgaaaaagtggcaccgagtcggtgctttt

SEQ ID NO: 1345 - RNA, 100 nt, synthetic construct
  source 1..100: mol_type = other RNA
agaaacctgtctggttctgtgttttagagctagaaatagcaagttaaaataaggctagtccgttatcaacttgaaaaagtggcaccgagtcggtgctttt

SEQ ID NO: 1346 - RNA, 100 nt, synthetic construct
  source 1..100: mol_type = other RNA
tgatgttacctgcagggttggttttagagctagaaatagcaagttaaaataaggctagtccgttatcaacttgaaaaagtggcaccgagtcggtgctttt

SEQ ID NO: 1347 - RNA, 100 nt, synthetic construct
  source 1..100: mol_type = other RNA
ctgcaggtaacatcatgtctgttttagagctagaaatagcaagttaaaataaggctagtccgttatcaacttgaaaaagtggcaccgagtcggtgctttt

SEQ ID NO: 1348 - RNA, 100 nt, synthetic construct
  source 1..100: mol_type = other RNA
accaggtatgttcatggagtgttttagagctagaaatagcaagttaaaataaggctagtccgttatcaacttgaaaaagtggcaccgagtcggtgctttt

SEQ ID NO: 1349 - RNA, 100 nt, synthetic construct
  source 1..100: mol_type = other RNA
ttccagcaactgtggatacagttttagagctagaaatagcaagttaaaataaggctagtccgttatcaacttgaaaaagtggcaccgagtcggtgctttt

SEQ ID NO: 1350 - RNA, 100 nt, synthetic construct
  source 1..100: mol_type = other RNA
tccacagttgctggaagtgcgttttagagctagaaatagcaagttaaaataaggctagtccgttatcaacttgaaaaagtggcaccgagtcggtgctttt

SEQ ID NO: 1351 - RNA, 100 nt, synthetic construct
  source 1..100: mol_type = other RNA
ggtgctcacactagtggtccgttttagagctagaaatagcaagttaaaataaggctagtccgttatcaacttgaaaaagtggcaccgagtcggtgctttt

SEQ ID NO: 1352 - RNA, 100 nt, synthetic construct
  source 1..100: mol_type = other RNA
gggacctcacctccacagccgttttagagctagaaatagcaagttaaaataaggctagtccgttatcaacttgaaaaagtggcaccgagtcggtgctttt

SEQ ID NO: 1353 - RNA, 100 nt, synthetic construct
  source 1..100: mol_type = other RNA
ggacctcacctccacagcctgttttagagctagaaatagcaagttaaaataaggctagtccgttatcaacttgaaaaagtggcaccgagtcggtgctttt

SEQ ID NO: 1354 - RNA, 100 nt, synthetic construct
  source 1..100: mol_type = other RNA
atacctgcctgtgcaggtaggttttagagctagaaatagcaagttaaaataaggctagtccgttatcaacttgaaaaagtggcaccgagtcggtgctttt

SEQ ID NO: 1355 - RNA, 100 nt, synthetic construct
  source 1..100: mol_type = other RNA
gcttccatacctgcctgtgcgttttagagctagaaatagcaagttaaaataaggctagtccgttatcaacttgaaaaagtggcaccgagtcggtgctttt

SEQ ID NO: 1356 - RNA, 100 nt, synthetic construct
  source 1..100: mol_type = other RNA
tcatctcaggtggctgcagtgttttagagctagaaatagcaagttaaaataaggctagtccgttatcaacttgaaaaagtggcaccgagtcggtgctttt

SEQ ID NO: 1357 - RNA, 100 nt, synthetic construct
  source 1..100: mol_type = other RNA
ttcatctcaggtggctgcaggttttagagctagaaatagcaagttaaaataaggctagtccgttatcaacttgaaaaagtggcaccgagtcggtgctttt

SEQ ID NO: 1358 - RNA, 100 nt, synthetic construct
  source 1..100: mol_type = other RNA
gtacctgtgtcatagccctggttttagagctagaaatagcaagttaaaataaggctagtccgttatcaacttgaaaaagtggcaccgagtcggtgctttt

SEQ ID NO: 1359 - RNA, 100 nt, synthetic construct
  source 1..100: mol_type = other RNA
gtctacctctgcagagcaaagttttagagctagaaatagcaagttaaaataaggctagtccgttatcaacttgaaaaagtggcaccgagtcggtgctttt

SEQ ID NO: 1360 - RNA, 100 nt, synthetic construct
  source 1..100: mol_type = other RNA
cgtctacctctgcagagcaagttttagagctagaaatagcaagttaaaataaggctagtccgttatcaacttgaaaaagtggcaccgagtcggtgctttt

SEQ ID NO: 1361 - RNA, 100 nt, synthetic construct
  source 1..100: mol_type = other RNA
ctgcagaggtagacgaggctgttttagagctagaaatagcaagttaaaataaggctagtccgttatcaacttgaaaaagtggcaccgagtcggtgctttt

SEQ ID NO: 1362 - RNA, 100 nt, synthetic construct
  source 1..100: mol_type = other RNA
tctgcagaggtagacgaggcgttttagagctagaaatagcaagttaaaataaggctagtccgttatcaacttgaaaaagtggcaccgagtcggtgctttt

SEQ ID NO: 1363 - RNA, 100 nt, synthetic construct
  source 1..100: mol_type = other RNA
ttgctctgcagaggtagacggttttagagctagaaatagcaagttaaaataaggctagtccgttatcaacttgaaaaagtggcaccgagtcggtgctttt

SEQ ID NO: 1364 - RNA, 100 nt, synthetic construct
  source 1..100: mol_type = other RNA
ctccacctgaggaaagacatgttttagagctagaaatagcaagttaaaataaggctagtccgttatcaacttgaaaaagtggcaccgagtcggtgctttt

SEQ ID NO: 1365 - RNA, 100 nt, synthetic construct
  source 1..100: mol_type = other RNA
ctgactcacccaaaacagcagttttagagctagaaatagcaagttaaaataaggctagtccgttatcaacttgaaaaagtggcaccgagtcggtgctttt

SEQ ID NO: 1366 - RNA, 100 nt, synthetic construct
  source 1..100: mol_type = other RNA
cacccaaaacagcaaggacagttttagagctagaaatagcaagttaaaataaggctagtccgttatcaacttgaaaaagtggcaccgagtcggtgctttt

SEQ ID NO: 1367 - RNA, 100 nt, synthetic construct
  source 1..100: mol_type = other RNA
cctacctgccaaaggagaaggttttagagctagaaatagcaagttaaaataaggctagtccgttatcaacttgaaaaagtggcaccgagtcggtgctttt

SEQ ID NO: 1368 - RNA, 100 nt, synthetic construct
  source 1..100: mol_type = other RNA
ccccacagctcactgtctgcgttttagagctagaaatagcaagttaaaataaggctagtccgttatcaacttgaaaaagtggcaccgagtcggtgctttt

SEQ ID NO: 1369 - RNA, 100 nt, synthetic construct
  source 1..100: mol_type = other RNA
cagacagtgagctgtggggtgttttagagctagaaatagcaagttaaaataaggctagtccgttatcaacttgaaaaagtggcaccgagtcggtgctttt

SEQ ID NO: 1370 - RNA, 100 nt, synthetic construct
  source 1..100: mol_type = other RNA
ccccacctgtcttagtctccgttttagagctagaaatagcaagttaaaataaggctagtccgttatcaacttgaaaaagtggcaccgagtcggtgctttt

SEQ ID NO: 1371 - RNA, 100 nt, synthetic construct
  source 1..100: mol_type = other RNA
tcttaggggagctgaactcagttttagagctagaaatagcaagttaaaataaggctagtccgttatcaacttgaaaaagtggcaccgagtcggtgctttt

SEQ ID NO: 1372 - RNA, 100 nt, synthetic construct
  source 1..100: mol_type = other RNA
tcccctaagaaggacagagcgttttagagctagaaatagcaagttaaaataaggctagtccgttatcaacttgaaaaagtggcaccgagtcggtgctttt

SEQ ID NO: 1373 - RNA, 100 nt, synthetic construct
  source 1..100: mol_type = other RNA
atcaggtgagcgtgcatgtagttttagagctagaaatagcaagttaaaataaggctagtccgttatcaacttgaaaaagtggcaccgagtcggtgctttt

SEQ ID NO: 1374 - RNA, 100 nt, synthetic construct
  source 1..100: mol_type = other RNA
tcttccaggtgctgcacttggttttagagctagaaatagcaagttaaaataaggctagtccgttatcaacttgaaaaagtggcaccgagtcggtgctttt

SEQ ID NO: 1375 - RNA, 100 nt, synthetic construct
  source 1..100: mol_type = other RNA
ctcttccaggtgctgcacttgttttagagctagaaatagcaagttaaaataaggctagtccgttatcaacttgaaaaagtggcaccgagtcggtgctttt

SEQ ID NO: 1376 - RNA, 100 nt, synthetic construct
  source 1..100: mol_type = other RNA
cctcttccaggtgctgcactgttttagagctagaaatagcaagttaaaataaggctagtccgttatcaacttgaaaaagtggcaccgagtcggtgctttt

SEQ ID NO: 1377 - RNA, 100 nt, synthetic construct
  source 1..100: mol_type = other RNA
cttccaggtgctgcacttgggttttagagctagaaatagcaagttaaaataaggctagtccgttatcaacttgaaaaagtggcaccgagtcggtgctttt

SEQ ID NO: 1378 - RNA, 100 nt, synthetic construct
  source 1..100: mol_type = other RNA
cagggtctggaaaacaggaagttttagagctagaaatagcaagttaaaataaggctagtccgttatcaacttgaaaaagtggcaccgagtcggtgctttt

SEQ ID NO: 1379 - RNA, 100 nt, synthetic construct
  source 1..100: mol_type = other RNA
agggtctggaaaacaggaatgttttagagctagaaatagcaagttaaaataaggctagtccgttatcaacttgaaaaagtggcaccgagtcggtgctttt

SEQ ID NO: 1380 - RNA, 100 nt, synthetic construct
  source 1..100: mol_type = other RNA
ctttcaggcaccttgagcacgttttagagctagaaatagcaagttaaaataaggctagtccgttatcaacttgaaaaagtggcaccgagtcggtgctttt

SEQ ID NO: 1381 - RNA, 100 nt, synthetic construct
  source 1..100: mol_type = other RNA
cctcacccacctggctgtgcgttttagagctagaaatagcaagttaaaataaggctagtccgttatcaacttgaaaaagtggcaccgagtcggtgctttt

SEQ ID NO: 1382 - RNA, 100 nt, synthetic construct
  source 1..100: mol_type = other RNA
ctgcacaggtggtttcagttgttttagagctagaaatagcaagttaaaataaggctagtccgttatcaacttgaaaaagtggcaccgagtcggtgctttt

SEQ ID NO: 1383 - RNA, 100 nt, synthetic construct
  source 1..100: mol_type = other RNA
gctgcacaggtggtttcagtgttttagagctagaaatagcaagttaaaataaggctagtccgttatcaacttgaaaaagtggcaccgagtcggtgctttt

SEQ ID NO: 1384 - RNA, 100 nt, synthetic construct
  source 1..100: mol_type = other RNA
ccacctgtgcagcagggacagttttagagctagaaatagcaagttaaaataaggctagtccgttatcaacttgaaaaagtggcaccgagtcggtgctttt

SEQ ID NO: 1385 - RNA, 100 nt, synthetic construct
  source 1..100: mol_type = other RNA
cacctgtgcagcagggacaggttttagagctagaaatagcaagttaaaataaggctagtccgttatcaacttgaaaaagtggcaccgagtcggtgctttt

SEQ ID NO: 1386 - RNA, 100 nt, synthetic construct
  source 1..100: mol_type = other RNA
accacctgtgcagcagggacgttttagagctagaaatagcaagttaaaataaggctagtccgttatcaacttgaaaaagtggcaccgagtcggtgctttt

SEQ ID NO: 1387 - RNA, 100 nt, synthetic construct
  source 1..100: mol_type = other RNA
tcctcagatgtaggggagaagttttagagctagaaatagcaagttaaaataaggctagtccgttatcaacttgaaaaagtggcaccgagtcggtgctttt

SEQ ID NO: 1388 - RNA, 100 nt, synthetic construct
  source 1..100: mol_type = other RNA
ttcctcagatgtaggggagagttttagagctagaaatagcaagttaaaataaggctagtccgttatcaacttgaaaaagtggcaccgagtcggtgctttt

SEQ ID NO: 1389 - RNA, 100 nt, synthetic construct
  source 1..100: mol_type = other RNA
tcgccgactgggtgctgctcgttttagagctagaaatagcaagttaaaataaggctagtccgttatcaacttgaaaaagtggcaccgagtcggtgctttt

SEQ ID NO: 1390 - RNA, 100 nt, synthetic construct
  source 1..100: mol_type = other RNA
gtgctcttcccagacccattgttttagagctagaaatagcaagttaaaataaggctagtccgttatcaacttgaaaaagtggcaccgagtcggtgctttt

SEQ ID NO: 1391 - RNA, 100 nt, synthetic construct
  source 1..100: mol_type = other RNA
tgtgctcttcccagacccatgttttagagctagaaatagcaagttaaaataaggctagtccgttatcaacttgaaaaagtggcaccgagtcggtgctttt

SEQ ID NO: 1392 - RNA, 100 nt, synthetic construct
  source 1..100: mol_type = other RNA
tgggtctgggaagagcacaggttttagagctagaaatagcaagttaaaataaggctagtccgttatcaacttgaaaaagtggcaccgagtcggtgctttt

SEQ ID NO: 1393 - RNA, 100 nt, synthetic construct
  source 1..100: mol_type = other RNA
gtcgctgaccccctgacagcgttttagagctagaaatagcaagttaaaataaggctagtccgttatcaacttgaaaaagtggcaccgagtcggtgctttt

SEQ ID NO: 1394 - RNA, 100 nt, synthetic construct
  source 1..100: mol_type = other RNA
tcagcgacaggcagtggcgtgttttagagctagaaatagcaagttaaaataaggctagtccgttatcaacttgaaaaagtggcaccgagtcggtgctttt

SEQ ID NO: 1395 - RNA, 100 nt, synthetic construct
  source 1..100: mol_type = other RNA
ggataagtacacacggtttcgttttagagctagaaatagcaagttaaaataaggctagtccgttatcaacttgaaaaagtggcaccgagtcggtgctttt

SEQ ID NO: 1396 - RNA, 100 nt, synthetic construct
  source 1..100: mol_type = other RNA
tcatccaggataagtacacagttttagagctagaaatagcaagttaaaataaggctagtccgttatcaacttgaaaaagtggcaccgagtcggtgctttt

SEQ ID NO: 1397 - RNA, 100 nt, synthetic construct
  source 1..100: mol_type = other RNA
gggcactggtggcatcatccgttttagagctagaaatagcaagttaaaataaggctagtccgttatcaacttgaaaaagtggcaccgagtcggtgctttt

SEQ ID NO: 1398 - RNA, 100 nt, synthetic construct
  source 1..100: mol_type = other RNA
gtttgcatccagggcactgggttttagagctagaaatagcaagttaaaataaggctagtccgttatcaacttgaaaaagtggcaccgagtcggtgctttt

SEQ ID NO: 1399 - RNA, 100 nt, synthetic construct
  source 1..100: mol_type = other RNA
catcacccagcacctcagccgttttagagctagaaatagcaagttaaaataaggctagtccgttatcaacttgaaaaagtggcaccgagtcggtgctttt

SEQ ID NO: 1400 - RNA, 100 nt, synthetic construct
  source 1..100: mol_type = other RNA
cacccagcacctcagcctgggttttagagctagaaatagcaagttaaaataaggctagtccgttatcaacttgaaaaagtggcaccgagtcggtgctttt

SEQ ID NO: 1401 - RNA, 99 nt, synthetic construct
  source 1..99: mol_type = other RNA
ggtggacgcggctttactggttttagagctagaaatagcaagttaaaataaggctagtccgttatcaacttgaaaaagtggcaccgagtcggtgctttt

SEQ ID NO: 1402 - RNA, 100 nt, synthetic construct
  source 1..100: mol_type = other RNA
tgcgggacagaaacaacgtcgttttagagctagaaatagcaagttaaaataaggctagtccgttatcaacttgaaaaagtggcaccgagtcggtgctttt

SEQ ID NO: 1403 - RNA, 100 nt, synthetic construct
  source 1..100: mol_type = other RNA
ggacccgcgggtctcgtacagttttagagctagaaatagcaagttaaaataaggctagtccgttatcaacttgaaaaagtggcaccgagtcggtgctttt

SEQ ID NO: 1404 - RNA, 100 nt, synthetic construct
  source 1..100: mol_type = other RNA
catccaggatgaggacccgcgttttagagctagaaatagcaagttaaaataaggctagtccgttatcaacttgaaaaagtggcaccgagtcggtgctttt

SEQ ID NO: 1405 - RNA, 100 nt, synthetic construct
  source 1..100: mol_type = other RNA
tcatccaggatgaggacccggttttagagctagaaatagcaagttaaaataaggctagtccgttatcaacttgaaaaagtggcaccgagtcggtgctttt

SEQ ID NO: 1406 - RNA, 100 nt, synthetic construct
  source 1..100: mol_type = other RNA
gcgggtcctcatcctggatggttttagagctagaaatagcaagttaaaataaggctagtccgttatcaacttgaaaaagtggcaccgagtcggtgctttt

SEQ ID NO: 1407 - RNA, 100 nt, synthetic construct
  source 1..100: mol_type = other RNA
gggcactagtagcctcatccgttttagagctagaaatagcaagttaaaataaggctagtccgttatcaacttgaaaaagtggcaccgagtcggtgctttt

SEQ ID NO: 1408 - RNA, 100 nt, synthetic construct
  source 1..100: mol_type = other RNA
cctagatgtgcagtgcgagcgttttagagctagaaatagcaagttaaaataaggctagtccgttatcaacttgaaaaagtggcaccgagtcggtgctttt

SEQ ID NO: 1409 - RNA, 100 nt, synthetic construct
  source 1..100: mol_type = other RNA
actcacgctggatagcctccgttttagagctagaaatagcaagttaaaataaggctagtccgttatcaacttgaaaaagtggcaccgagtcggtgctttt

SEQ ID NO: 1410 - RNA, 100 nt, synthetic construct
  source 1..100: mol_type = other RNA
cacagcccaagatagttaaggttttagagctagaaatagcaagttaaaataaggctagtccgttatcaacttgaaaaagtggcaccgagtcggtgctttt

SEQ ID NO: 1411 - RNA, 100 nt, synthetic construct
  source 1..100: mol_type = other RNA
acagcccaagatagttaagtgttttagagctagaaatagcaagttaaaataaggctagtccgttatcaacttgaaaaagtggcaccgagtcggtgctttt

SEQ ID NO: 1412 - RNA, 100 nt, synthetic construct
  source 1..100: mol_type = other RNA
cagcccaagatagttaagtggttttagagctagaaatagcaagttaaaataaggctagtccgttatcaacttgaaaaagtggcaccgagtcggtgctttt

SEQ ID NO: 1413 - RNA, 100 nt, synthetic construct
  source 1..100: mol_type = other RNA
ttaccccacttaactatcttgttttagagctagaaatagcaagttaaaataaggctagtccgttatcaacttgaaaaagtggcaccgagtcggtgctttt

SEQ ID NO: 1414 - RNA, 100 nt, synthetic construct
  source 1..100: mol_type = other RNA
cttaccccacttaactatctgttttagagctagaaatagcaagttaaaataaggctagtccgttatcaacttgaaaaagtggcaccgagtcggtgctttt

SEQ ID NO: 1415 - RNA, 100 nt, synthetic construct
  source 1..100: mol_type = other RNA
tcgatctatgaaaaagacaggttttagagctagaaatagcaagttaaaataaggctagtccgttatcaacttgaaaaagtggcaccgagtcggtgctttt

SEQ ID NO: 1416 - RNA, 99 nt, synthetic construct
  source 1..99: mol_type = other RNA
ctcacgctggatagcctccgttttagagctagaaatagcaagttaaaataaggctagtccgttatcaacttgaaaaagtggcaccgagtcggtgctttt

SEQ ID NO: 1417 - RNA, 98 nt, synthetic construct
  source 1..98: mol_type = other RNA
tcacgctggatagcctccgttttagagctagaaatagcaagttaaaataaggctagtccgttatcaacttgaaaaagtggcaccgagtcggtgctttt

SEQ ID NO: 1418 - RNA, 100 nt, synthetic construct
  source 1..100: mol_type = other RNA
cgcgagcacagctaaggccagttttagagctagaaatagcaagttaaaataaggctagtccgttatcaacttgaaaaagtggcaccgagtcggtgctttt

SEQ ID NO: 1419 - RNA, 100 nt, synthetic construct
  source 1..100: mol_type = other RNA
gagtagcgcgagcacagctagttttagagctagaaatagcaagttaaaataaggctagtccgttatcaacttgaaaaagtggcaccgagtcggtgctttt

SEQ ID NO: 1420 - RNA, 100 nt, synthetic construct
  source 1..100: mol_type = other RNA
gctactctctctttctggccgttttagagctagaaatagcaagttaaaataaggctagtccgttatcaacttgaaaaagtggcaccgagtcggtgctttt

SEQ ID NO: 1421 - RNA, 100 nt, synthetic construct
  source 1..100: mol_type = other RNA
cgtgagtaaacctgaatcttgttttagagctagaaatagcaagttaaaataaggctagtccgttatcaacttgaaaaagtggcaccgagtcggtgctttt

SEQ ID NO: 1422 - RNA, 100 nt, synthetic construct
  source 1..100: mol_type = other RNA
tttgactttccattctctgcgttttagagctagaaatagcaagttaaaataaggctagtccgttatcaacttgaaaaagtggcaccgagtcggtgctttt

SEQ ID NO: 1423 - RNA, 100 nt, synthetic construct
  source 1..100: mol_type = other RNA
acccagacacatagcaattcgttttagagctagaaatagcaagttaaaataaggctagtccgttatcaacttgaaaaagtggcaccgagtcggtgctttt

SEQ ID NO: 1424 - RNA, 100 nt, synthetic construct
  source 1..100: mol_type = other RNA
aagtcaacttcaatgtcggagttttagagctagaaatagcaagttaaaataaggctagtccgttatcaacttgaaaaagtggcaccgagtcggtgctttt

SEQ ID NO: 1425 - RNA, 100 nt, synthetic construct
  source 1..100: mol_type = other RNA
cagtaagtcaacttcaatgtgttttagagctagaaatagcaagttaaaataaggctagtccgttatcaacttgaaaaagtggcaccgagtcggtgctttt

SEQ ID NO: 1426 - RNA, 100 nt, synthetic construct
  source 1..100: mol_type = other RNA
gaagttgacttactgaagaagttttagagctagaaatagcaagttaaaataaggctagtccgttatcaacttgaaaaagtggcaccgagtcggtgctttt

SEQ ID NO: 1427 - RNA, 100 nt, synthetic construct
  source 1..100: mol_type = other RNA
tggagagagaattgaaaaaggttttagagctagaaatagcaagttaaaataaggctagtccgttatcaacttgaaaaagtggcaccgagtcggtgctttt

SEQ ID NO: 1428 - RNA, 100 nt, synthetic construct
  source 1..100: mol_type = other RNA
ttcagacttgtctttcagcagttttagagctagaaatagcaagttaaaataaggctagtccgttatcaacttgaaaaagtggcaccgagtcggtgctttt

SEQ ID NO: 1429 - RNA, 100 nt, synthetic construct
  source 1..100: mol_type = other RNA
acttgtctttcagcaaggacgttttagagctagaaatagcaagttaaaataaggctagtccgttatcaacttgaaaaagtggcaccgagtcggtgctttt

SEQ ID NO: 1430 - RNA, 100 nt, synthetic construct
  source 1..100: mol_type = other RNA
atactcatctttttcagtgggttttagagctagaaatagcaagttaaaataaggctagtccgttatcaacttgaaaaagtggcaccgagtcggtgctttt

SEQ ID NO: 1431 - RNA, 100 nt, synthetic construct
  source 1..100: mol_type = other RNA
catactcatctttttcagtggttttagagctagaaatagcaagttaaaataaggctagtccgttatcaacttgaaaaagtggcaccgagtcggtgctttt

SEQ ID NO: 1432 - RNA, 100 nt, synthetic construct
  source 1..100: mol_type = other RNA
gcatactcatctttttcagtgttttagagctagaaatagcaagttaaaataaggctagtccgttatcaacttgaaaaagtggcaccgagtcggtgctttt

SEQ ID NO: 1433 - RNA, 100 nt, synthetic construct
  source 1..100: mol_type = other RNA
ggcatactcatctttttcaggttttagagctagaaatagcaagttaaaataaggctagtccgttatcaacttgaaaaagtggcaccgagtcggtgctttt

SEQ ID NO: 1434 - RNA, 100 nt, synthetic construct
  source 1..100: mol_type = other RNA
agtcacatggttcacacggcgttttagagctagaaatagcaagttaaaataaggctagtccgttatcaacttgaaaaagtggcaccgagtcggtgctttt

SEQ ID NO: 1435 - RNA, 100 nt, synthetic construct
  source 1..100: mol_type = other RNA
acaaagtcacatggttcacagttttagagctagaaatagcaagttaaaataaggctagtccgttatcaacttgaaaaagtggcaccgagtcggtgctttt

SEQ ID NO: 1436 - RNA, 100 nt, synthetic construct
  source 1..100: mol_type = other RNA
tgggctgtgacaaagtcacagttttagagctagaaatagcaagttaaaataaggctagtccgttatcaacttgaaaaagtggcaccgagtcggtgctttt

SEQ ID NO: 1437 - RNA, 100 nt, synthetic construct
  source 1..100: mol_type = other RNA
aagcatgtgctccagaggttgttttagagctagaaatagcaagttaaaataaggctagtccgttatcaacttgaaaaagtggcaccgagtcggtgctttt

SEQ ID NO: 1438 - RNA, 100 nt, synthetic construct
  source 1..100: mol_type = other RNA
gaagcatgtgctccagaggtgttttagagctagaaatagcaagttaaaataaggctagtccgttatcaacttgaaaaagtggcaccgagtcggtgctttt

SEQ ID NO: 1439 - RNA, 100 nt, synthetic construct
  source 1..100: mol_type = other RNA
ttcttacccagggtacaggggttttagagctagaaatagcaagttaaaataaggctagtccgttatcaacttgaaaaagtggcaccgagtcggtgctttt

SEQ ID NO: 1440 - RNA, 100 nt, synthetic construct; identical to SEQ ID NO: 1439
  source 1..100: mol_type = other RNA

SEQ ID NO: 1441 - RNA, 100 nt, synthetic construct
  source 1..100: mol_type = other RNA
cgaccagaagattgtagaatgttttagagctagaaatagcaagttaaaataaggctagtccgttatcaacttgaaaaagtggcaccgagtcggtgctttt

SEQ ID NO: 1442 - RNA, 100 nt, synthetic construct
  source 1..100: mol_type = other RNA
tcgaccagaagattgtagaagttttagagctagaaatagcaagttaaaataaggctagtccgttatcaacttgaaaaagtggcaccgagtcggtgctttt

SEQ ID NO: 1443 - RNA, 100 nt, synthetic construct
  source 1..100: mol_type = other RNA
aatcccattctacaatcttcgttttagagctagaaatagcaagttaaaataaggctagtccgttatcaacttgaaaaagtggcaccgagtcggtgctttt

SEQ ID NO: 1444 - RNA, 100 nt, synthetic construct
  source 1..100: mol_type = other RNA
tgcaatccattctactccaagttttagagctagaaatagcaagttaaaataaggctagtccgttatcaacttgaaaaagtggcaccgagtcggtgctttt

SEQ ID NO: 1445 - RNA, 100 nt, synthetic construct
  source 1..100: mol_type = other RNA
ggtccatgaggagccagcccgttttagagctagaaatagcaagttaaaataaggctagtccgttatcaacttgaaaaagtggcaccgagtcggtgctttt

SEQ ID NO: 1446 - RNA, 100 nt, synthetic construct
  source 1..100: mol_type = other RNA
tgcagggttcaccagccagcgttttagagctagaaatagcaagttaaaataaggctagtccgttatcaacttgaaaaagtggcaccgagtcggtgctttt

SEQ ID NO: 1447 - RNA, 100 nt, synthetic construct
  source 1..100: mol_type = other RNA
cgaaaactgcgaggagaccagttttagagctagaaatagcaagttaaaataaggctagtccgttatcaacttgaaaaagtggcaccgagtcggtgctttt

SEQ ID NO: 1448 - RNA, 100 nt, synthetic construct
  source 1..100: mol_type = other RNA
aggctgcaagattgtggcaagttttagagctagaaatagcaagttaaaataaggctagtccgttatcaacttgaaaaagtggcaccgagtcggtgctttt

SEQ ID NO: 1449 - RNA, 100 nt, synthetic construct
  source 1..100: mol_type = other RNA
tgccagagctccagacctgcgttttagagctagaaatagcaagttaaaataaggctagtccgttatcaacttgaaaaagtggcaccgagtcggtgctttt

SEQ ID NO: 1450 - RNA, 100 nt, synthetic construct
  source 1..100: mol_type = other RNA
atactcactccacttcctccgttttagagctagaaatagcaagttaaaataaggctagtccgttatcaacttgaaaaagtggcaccgagtcggtgctttt

SEQ ID NO: 1451 - RNA, 100 nt, synthetic construct; identical to SEQ ID NO: 1450
  source 1..100: mol_type = other RNA

SEQ ID NO: 1452 - RNA, 100 nt, synthetic construct
  source 1..100: mol_type = other RNA
aggctgtggagagcaggagagttttagagctagaaatagcaagttaaaataaggctagtccgttatcaacttgaaaaagtggcaccgagtcggtgctttt

SEQ ID NO: 1453 - RNA, 100 nt, synthetic construct
  source 1..100: mol_type = other RNA
tccacagcctcagtaacaacgttttagagctagaaatagcaagttaaaataaggctagtccgttatcaacttgaaaaagtggcaccgagtcggtgctttt

SEQ ID NO: 1454 - RNA, 100 nt, synthetic construct
  source 1..100: mol_type = other RNA
gcaggctgtgaagacaaaaggttttagagctagaaatagcaagttaaaataaggctagtccgttatcaacttgaaaaagtggcaccgagtcggtgctttt

SEQ ID NO: 1455 - RNA, 100 nt, synthetic construct
  source 1..100: mol_type = other RNA
caggctgtgaagacaaaagagttttagagctagaaatagcaagttaaaataaggctagtccgttatcaacttgaaaaagtggcaccgagtcggtgctttt

SEQ ID NO: 1456 - RNA, 100 nt, synthetic construct
  source 1..100: mol_type = other RNA
gccctggagggacatcaccagttttagagctagaaatagcaagttaaaataaggctagtccgttatcaacttgaaaaagtggcaccgagtcggtgctttt

SEQ ID NO: 1457 - RNA, 100 nt, synthetic construct
  source 1..100: mol_type = other RNA
ctgggcaggctgacacattggttttagagctagaaatagcaagttaaaataaggctagtccgttatcaacttgaaaaagtggcaccgagtcggtgctttt

SEQ ID NO: 1458 - RNA, 100 nt, synthetic construct
  source 1..100: mol_type = other RNA
atctccagcctcagtgagaagttttagagctagaaatagcaagttaaaataaggctagtccgttatcaacttgaaaaagtggcaccgagtcggtgctttt

SEQ ID NO: 1459 - RNA, 100 nt, synthetic construct
  source 1..100: mol_type = other RNA
actgaggctggagatcacaggttttagagctagaaatagcaagttaaaataaggctagtccgttatcaacttgaaaaagtggcaccgagtcggtgctttt

SEQ ID NO: 1460 - RNA, 100 nt, synthetic construct
  source 1..100: mol_type = other RNA
acgctcacctgatgtccaaggttttagagctagaaatagcaagttaaaataaggctagtccgttatcaacttgaaaaagtggcaccgagtcggtgctttt

SEQ ID NO: 1461 - RNA, 100 nt, synthetic construct; identical to SEQ ID NO: 1460
  source 1..100: mol_type = other RNA

SEQ ID NO: 1462 - RNA, 100 nt, synthetic construct
  source 1..100: mol_type = other RNA
cctagggatatgtgggccacgttttagagctagaaatagcaagttaaaataaggctagtccgttatcaacttgaaaaagtggcaccgagtcggtgctttt

SEQ ID NO: 1463 - RNA, 100 nt, synthetic construct
  source 1..100: mol_type = other RNA
ctgaggctgcaaaggggcaagttttagagctagaaatagcaagttaaaataaggctagtccgttatcaacttgaaaaagtggcaccgagtcggtgctttt

SEQ ID NO: 1464 - RNA, 100 nt, synthetic construct
  source 1..100: mol_type = other RNA
gacaatctgtgaaacaaagcgttttagagctagaaatagcaagttaaaataaggctagtccgttatcaacttgaaaaagtggcaccgagtcggtgctttt

SEQ ID NO: 1465 - RNA, 100 nt, synthetic construct
  source 1..100: mol_type = other RNA
ccttttcaggctgagccagagttttagagctagaaatagcaagttaaaataaggctagtccgttatcaacttgaaaaagtggcaccgagtcggtgctttt

SEQ ID NO: 1466 - RNA, 100 nt, synthetic construct
  source 1..100: mol_type = other RNA
cttttcaggctgagccagacgttttagagctagaaatagcaagttaaaataaggctagtccgttatcaacttgaaaaagtggcaccgagtcggtgctttt

SEQ ID NO: 1467 - RNA, 100 nt, synthetic construct
  source 1..100: mol_type = other RNA
gacctggatcagacaggaccgttttagagctagaaatagcaagttaaaataaggctagtccgttatcaacttgaaaaagtggcaccgagtcggtgctttt

SEQ ID NO: 1468 - RNA, 100 nt, synthetic construct
  source 1..100: mol_type = other RNA
caacttactccacctggctggttttagagctagaaatagcaagttaaaataaggctagtccgttatcaacttgaaaaagtggcaccgagtcggtgctttt

SEQ ID NO: 1469 - RNA, 100 nt, synthetic construct; identical to SEQ ID NO: 1468
  source 1..100: mol_type = other RNA

SEQ ID NO: 1470 - RNA, 100 nt, synthetic construct
  source 1..100: mol_type = other RNA
cttacttcactgaggcctccgttttagagctagaaatagcaagttaaaataaggctagtccgttatcaacttgaaaaagtggcaccgagtcggtgctttt

SEQ ID NO: 1471 - RNA, 100 nt, synthetic construct; identical to SEQ ID NO: 1470
  source 1..100: mol_type = other RNA

SEQ ID NO: 1472 - RNA, 100 nt, synthetic construct
  source 1..100: mol_type = other RNA
gctcacccaaagccacagcggttttagagctagaaatagcaagttaaaataaggctagtccgttatcaacttgaaaaagtggcaccgagtcggtgctttt

SEQ ID NO: 1473 - RNA, 100 nt, synthetic construct; identical to SEQ ID NO: 1472
  source 1..100: mol_type = other RNA

SEQ ID NO: 1474 - RNA, 100 nt, synthetic construct
  source 1..100: mol_type = other RNA
gctcttacctgctacctccagttttagagctagaaatagcaagttaaaataaggctagtccgttatcaacttgaaaaagtggcaccgagtcggtgctttt

SEQ ID NO: 1475 - RNA, 100 nt, synthetic construct; identical to SEQ ID NO: 1474
  source 1..100: mol_type = other RNA

SEQ ID NO: 1476 - RNA, 100 nt, synthetic construct
  source 1..100: mol_type = other RNA
aaagacctggcaggcagaaggttttagagctagaaatagcaagttaaaataaggctagtccgttatcaacttgaaaaagtggcaccgagtcggtgctttt

SEQ ID NO: 1477 - RNA, 100 nt, synthetic construct
  source 1..100: mol_type = other RNA
gaaccaacactcgatcaccggttttagagctagaaatagcaagttaaaataaggctagtccgttatcaacttgaaaaagtggcaccgagtcggtgctttt

SEQ ID NO: 1478 - RNA, 100 nt, synthetic construct
  source 1..100: mol_type = other RNA
gctggcccatttcgcagagggttttagagctagaaatagcaagttaaaataaggctagtccgttatcaacttgaaaaagtggcaccgagtcggtgctttt

SEQ ID NO: 1479 - RNA, 100 nt, synthetic construct
  source 1..100: mol_type = other RNA
ctggcccatttcgcagaggcgttttagagctagaaatagcaagttaaaataaggctagtccgttatcaacttgaaaaagtggcaccgagtcggtgctttt

SEQ ID NO: 1480 - RNA, 100 nt, synthetic construct
  source 1..100: mol_type = other RNA
accacagccagagcctcagcgttttagagctagaaatagcaagttaaaataaggctagtccgttatcaacttgaaaaagtggcaccgagtcggtgctttt

SEQ ID NO: 1481 - RNA, 100 nt, synthetic construct
  source 1..100: mol_type = other RNA
actgggacaagatgctctgcgttttagagctagaaatagcaagttaaaataaggctagtccgttatcaacttgaaaaagtggcaccgagtcggtgctttt

SEQ ID NO: 1482 - RNA, 100 nt, synthetic construct
  source 1..100: mol_type = other RNA
cgtcgccactctagcccaaagttttagagctagaaatagcaagttaaaataaggctagtccgttatcaacttgaaaaagtggcaccgagtcggtgctttt

SEQ ID NO: 1483 - RNA, 100 nt, synthetic construct
  source 1..100: mol_type = other RNA
gcgacgccagcacctgggtagttttagagctagaaatagcaagttaaaataaggctagtccgttatcaacttgaaaaagtggcaccgagtcggtgctttt

SEQ ID NO: 1484 - RNA, 100 nt, synthetic construct
  source 1..100: mol_type = other RNA
cgacgccagcacctgggtaagttttagagctagaaatagcaagttaaaataaggctagtccgttatcaacttgaaaaagtggcaccgagtcggtgctttt

SEQ ID NO: 1485 - RNA, 100 nt, synthetic construct
  source 1..100: mol_type = other RNA
atcccaagcagcaaatgccagttttagagctagaaatagcaagttaaaataaggctagtccgttatcaacttgaaaaagtggcaccgagtcggtgctttt

SEQ ID NO: 1486 - RNA, 100 nt, synthetic construct
  source 1..100: mol_type = other RNA
acagttcaaccctttcaggagttttagagctagaaatagcaagttaaaataaggctagtccgttatcaacttgaaaaagtggcaccgagtcggtgctttt

SEQ ID NO: 1487 - RNA, 100 nt, synthetic construct
  source 1..100: mol_type = other RNA
ctttcaggagggcacctatcgttttagagctagaaatagcaagttaaaataaggctagtccgttatcaacttgaaaaagtggcaccgagtcggtgctttt

SEQ ID NO: 1488 - RNA, 100 nt, synthetic construct
  source 1..100: mol_type = other RNA
cctgcaaggacaggtcacccgttttagagctagaaatagcaagttaaaataaggctagtccgttatcaacttgaaaaagtggcaccgagtcggtgctttt

SEQ ID NO: 1489 - RNA, 100 nt, synthetic construct
  source 1..100: mol_type = other RNA
cgagagccacctctgcccctgttttagagctagaaatagcaagttaaaataaggctagtccgttatcaacttgaaaaagtggcaccgagtcggtgctttt

SEQ ID NO: 1490 - RNA, 100 nt, synthetic construct
  source 1..100: mol_type = other RNA
aactggcatggcccgagccagttttagagctagaaatagcaagttaaaataaggctagtccgttatcaacttgaaaaagtggcaccgagtcggtgctttt

SEQ ID NO: 1491 - RNA, 100 nt, synthetic construct
  source 1..100: mol_type = other RNA
cactcaccggttcctggggggttttagagctagaaatagcaagttaaaataaggctagtccgttatcaacttgaaaaagtggcaccgagtcggtgctttt

SEQ ID NO: 1492 - RNA, 100 nt, synthetic construct; identical to SEQ ID NO: 1491
  source 1..100: mol_type = other RNA

SEQ ID NO: 1493 - RNA, 100 nt, synthetic construct
  source 1..100: mol_type = other RNA
cgcaggggacgtcgtcgtgcgttttagagctagaaatagcaagttaaaataaggctagtccgttatcaacttgaaaaagtggcaccgagtcggtgctttt

SEQ ID NO: 1494 - RNA, 100 nt, synthetic construct
  source 1..100: mol_type = other RNA
cacactcacagtacacggtggttttagagctagaaatagcaagttaaaataaggctagtccgttatcaacttgaaaaagtggcaccgagtcggtgctttt

SEQ ID NO: 1495 - RNA, 100 nt, synthetic construct; identical to SEQ ID NO: 1494
  source 1..100: mol_type = other RNA

SEQ ID NO: 1496 - RNA, 100 nt, synthetic construct
  source 1..100: mol_type = other RNA
tggtcctgggagagacagaagttttagagctagaaatagcaagttaaaataaggctagtccgttatcaacttgaaaaagtggcaccgagtcggtgctttt

SEQ ID NO: 1497 - RNA, 100 nt, synthetic construct
  source 1..100: mol_type = other RNA
ttcctcacctttgacctggagttttagagctagaaatagcaagttaaaataaggctagtccgttatcaacttgaaaaagtggcaccgagtcggtgctttt

SEQ ID NO: 1498 - RNA, 100 nt, synthetic construct; identical to SEQ ID NO: 1497
  source 1..100: mol_type = other RNA

SEQ ID NO: 1499 - RNA, 100 nt, synthetic construct
  source 1..100: mol_type = other RNA
cctacaggtgcccaacatgggttttagagctagaaatagcaagttaaaataaggctagtccgttatcaacttgaaaaagtggcaccgagtcggtgctttt

SEQ ID NO: 1500 - RNA, 100 nt, synthetic construct
  source 1..100: mol_type = other RNA
tgtcacagctgacttgggcggttttagagctagaaatagcaagttaaaataaggctagtccgttatcaacttgaaaaagtggcaccgagtcggtgctttt

SEQ ID NO: 1501 - RNA, 100 nt, synthetic construct
  source 1..100: mol_type = other RNA
aacgcagggccccagctattgttttagagctagaaatagcaagttaaaataaggctagtccgttatcaacttgaaaaagtggcaccgagtcggtgctttt

SEQ ID NO: 1502 - RNA, 100 nt, synthetic construct
  source 1..100: mol_type = other RNA
cccgcagggcagcaggagcggttttagagctagaaatagcaagttaaaataaggctagtccgttatcaacttgaaaaagtggcaccgagtcggtgctttt

SEQ ID NO: 1503 - RNA, 100 nt, synthetic construct
  source 1..100: mol_type = other RNA
gagtgccaggtgatttgggcgttttagagctagaaatagcaagttaaaataaggctagtccgttatcaacttgaaaaagtggcaccgagtcggtgctttt

SEQ ID NO: 1504 - RNA, 100 nt, synthetic construct
  source 1..100: mol_type = other RNA
cggggccatggggctgggccgttttagagctagaaatagcaagttaaaataaggctagtccgttatcaacttgaaaaagtggcaccgagtcggtgctttt

SEQ ID NO: 1505 - RNA, 100 nt, synthetic construct
  source 1..100: mol_type = other RNA
tcaccagcagcagctcccgggttttagagctagaaatagcaagttaaaataaggctagtccgttatcaacttgaaaaagtggcaccgagtcggtgctttt

SEQ ID NO: 1506 - RNA, 100 nt, synthetic construct; identical to SEQ ID NO: 1505
  source 1..100: mol_type = other RNA

SEQ ID NO: 1507 - RNA, 100 nt, synthetic construct
  source 1..100: mol_type = other RNA
cactcaccagcagcagctccgttttagagctagaaatagcaagttaaaataaggctagtccgttatcaacttgaaaaagtggcaccgagtcggtgctttt

SEQ ID NO: 1508 - RNA, 100 nt, synthetic construct; identical to SEQ ID NO: 1507
  source 1..100: mol_type = other RNA

SEQ ID NO: 1509 - RNA, 100 nt, synthetic construct
  source 1..100: mol_type = other RNA
ggcaggcttgcattccctccgttttagagctagaaatagcaagttaaaataaggctagtccgttatcaacttgaaaaagtggcaccgagtcggtgctttt

SEQ ID NO: 1510 - RNA, 100 nt, synthetic construct; identical to SEQ ID NO: 1509
  source 1..100: mol_type = other RNA

SEQ ID NO: 1511 - RNA, 100 nt, synthetic construct
  source 1..100: mol_type = other RNA
cgtcggtacctgttctcctcgttttagagctagaaatagcaagttaaaataaggctagtccgttatcaacttgaaaaagtggcaccgagtcggtgctttt

SEQ ID NO: 1512 - RNA, 100 nt, synthetic construct; identical to SEQ ID NO: 1511
  source 1..100: mol_type = other RNA

SEQ ID NO: 1513 - RNA, 100 nt, synthetic construct
  source 1..100: mol_type = other RNA
ttcttctccagtgccccccagttttagagctagaaatagcaagttaaaataaggctagtccgttatcaacttgaaaaagtggcaccgagtcggtgctttt

SEQ ID NO: 1514 - RNA, 100 nt, synthetic construct
  source 1..100: mol_type = other RNA
taggctcaccagagggcacagttttagagctagaaatagcaagttaaaataaggctagtccgttatcaacttgaaaaagtggcaccgagtcggtgctttt

SEQ ID NO: 1515 - RNA, 100 nt, synthetic construct; identical to SEQ ID NO: 1514
  source 1..100: mol_type = other RNA

SEQ ID NO: 1516 - RNA, 100 nt, synthetic construct
  source 1..100: mol_type = other RNA
ctgtccattcctcagtctccgttttagagctagaaatagcaagttaaaataaggctagtccgttatcaacttgaaaaagtggcaccgagtcggtgctttt

SEQ ID NO: 1517 - RNA, 100 nt, synthetic construct
  source 1..100: mol_type = other RNA
tgtcccatgtcttatttcccgttttagagctagaaatagcaagttaaaataaggctagtccgttatcaacttgaaaaagtggcaccgagtcggtgctttt

SEQ ID NO: 1518 - RNA, 100 nt, synthetic construct
  source 1..100: mol_type = other RNA
cccgccttctaaatctccccgttttagagctagaaatagcaagttaaaataaggctagtccgttatcaacttgaaaaagtggcaccgagtcggtgctttt

SEQ ID NO: 1519 - RNA, 100 nt, synthetic construct
  source 1..100: mol_type = other RNA
ggaattttctcttccaagcggttttagagctagaaatagcaagttaaaataaggctagtccgttatcaacttgaaaaagtggcaccgagtcggtgctttt

SEQ ID NO: 1520 - RNA, 100 nt, synthetic construct
  source 1..100: mol_type = other RNA
aagagaaaattccagtgggcgttttagagctagaaatagcaagttaaaataaggctagtccgttatcaacttgaaaaagtggcaccgagtcggtgctttt

SEQ ID NO: 1521 - RNA, 100 nt, synthetic construct
  source 1..100: mol_type = other RNA
ggagagggcggggccacgctgttttagagctagaaatagcaagttaaaataaggctagtccgttatcaacttgaaaaagtggcaccgagtcggtgctttt

SEQ ID NO: 1522 - RNA, 100 nt, synthetic construct
  source 1..100: mol_type = other RNA
ccgccctctccgctcgtgatgttttagagctagaaatagcaagttaaaataaggctagtccgttatcaacttgaaaaagtggcaccgagtcggtgctttt

SEQ ID NO: 1523 - RNA, 100 nt, synthetic construct
  source 1..100: mol_type = other RNA
agggccaatcacgagcggaggttttagagctagaaatagcaagttaaaataaggctagtccgttatcaacttgaaaaagtggcaccgagtcggtgctttt

SEQ ID NO: 1524 - RNA, 100 nt, synthetic construct
  source 1..100: mol_type = other RNA
tcgtgattggccctaagttcgttttagagctagaaatagcaagttaaaataaggctagtccgttatcaacttgaaaaagtggcaccgagtcggtgctttt

SEQ ID NO: 1525 - RNA, 100 nt, synthetic construct
  source 1..100: mol_type = other RNA
aggggccatggggctgggccgttttagagctagaaatagcaagttaaaataaggctagtccgttatcaacttgaaaaagtggcaccgagtcggtgctttt

SEQ ID NO: 1526 - RNA, 100 nt, synthetic construct
  source 1..100: mol_type = other RNA
actcaccagcggcggctgccgttttagagctagaaatagcaagttaaaataaggctagtccgttatcaacttgaaaaagtggcaccgagtcggtgctttt

SEQ ID NO: 1527 - RNA, 100 nt, synthetic construct; identical to SEQ ID NO: 1526
  source 1..100: mol_type = other RNA

SEQ ID NO: 1528 - RNA, 100 nt, synthetic construct
  source 1..100: mol_type = other RNA
ctcaccagcggcggctgccggttttagagctagaaatagcaagttaaaataaggctagtccgttatcaacttgaaaaagtggcaccgagtcggtgctttt

SEQ ID NO: 1529 - RNA, 100 nt, synthetic construct; identical to SEQ ID NO: 1528
  source 1..100: mol_type = other RNA

SEQ ID NO: 1530 - RNA, 100 nt, synthetic construct
  source 1..100: mol_type = other RNA
cactcaccagcggcggctgcgttttagagctagaaatagcaagttaaaataaggctagtccgttatcaacttgaaaaagtggcaccgagtcggtgctttt

SEQ ID NO: 1531 - RNA, 100 nt, synthetic construct; identical to SEQ ID NO: 1530
  source 1..100: mol_type = other RNA

SEQ ID NO: 1532 - RNA, 100 nt, synthetic construct
  source 1..100: mol_type = other RNA
ctacagcgatatctgaaatcgttttagagctagaaatagcaagttaaaataaggctagtccgttatcaacttgaaaaagtggcaccgagtcggtgctttt

SEQ ID NO: 1533 - RNA, 100 nt, synthetic construct
  source 1..100: mol_type = other RNA
gtcggtacctgttctcctgagttttagagctagaaatagcaagttaaaataaggctagtccgttatcaacttgaaaaagtggcaccgagtcggtgctttt

SEQ ID NO: 1534 - RNA, 100 nt, synthetic construct; identical to SEQ ID NO: 1533
  source 1..100: mol_type = other RNA

SEQ ID NO: 1535 - RNA, 100 nt, synthetic construct
  source 1..100: mol_type = other RNA
caggctcaccagagggcacagttttagagctagaaatagcaagttaaaataaggctagtccgttatcaacttgaaaaagtggcaccgagtcggtgctttt

SEQ ID NO: 1536 - RNA, 100 nt, synthetic construct; identical to SEQ ID NO: 1535
  source 1..100: mol_type = other RNA

SEQ ID NO: 1537 - RNA, 100 nt, synthetic construct
  source 1..100: mol_type = other RNA
gaggcgcatggcggcgaggtgttttagagctagaaatagcaagttaaaataaggctagtccgttatcaacttgaaaaagtggcaccgagtcggtgctttt

SEQ ID NO: 1538 - RNA, 100 nt, synthetic construct; identical to SEQ ID NO: 1537
  source 1..100: mol_type = other RNA

SEQ ID NO: 1539 - RNA, 100 nt, synthetic construct
  source 1..100: mol_type = other RNA
cgcatggcggcgaggtgggggttttagagctagaaatagcaagttaaaataaggctagtccgttatcaacttgaaaaagtggcaccgagtcggtgctttt

SEQ ID NO: 1540 - RNA, 100 nt, synthetic construct; identical to SEQ ID NO: 1539
  source 1..100: mol_type = other RNA

SEQ ID NO: 1541 - RNA, 100 nt, synthetic construct
  source 1..100: mol_type = other RNA
aggcgcatggcggcgaggtggttttagagctagaaatagcaagttaaaataaggctagtccgttatcaacttgaaaaagtggcaccgagtcggtgctttt

SEQ ID NO: 1542 - RNA, 100 nt, synthetic construct; identical to SEQ ID NO: 1541
  source 1..100: mol_type = other RNA

SEQ ID NO: 1543 - RNA, 100 nt, synthetic construct
  source 1..100: mol_type = other RNA
ttcccacagggtaatgatgggttttagagctagaaatagcaagttaaaataaggctagtccgttatcaacttgaaaaagtggcaccgagtcggtgctttt

SEQ ID NO: 1544 - RNA, 100 nt, synthetic construct
  source 1..100: mol_type = other RNA
acgcctacaattggaaaacagttttagagctagaaatagcaagttaaaataaggctagtccgttatcaacttgaaaaagtggcaccgagtcggtgctttt

SEQ ID NO: 1545 - RNA, 100 nt, synthetic construct
  source 1..100: mol_type = other RNA
cgcctacaattggaaaacaagttttagagctagaaatagcaagttaaaataaggctagtccgttatcaacttgaaaaagtggcaccgagtcggtgctttt

SEQ ID NO: 1546 - RNA, 100 nt, synthetic construct
  source 1..100: mol_type = other RNA
caattgtaggcgtgatgggagttttagagctagaaatagcaagttaaaataaggctagtccgttatcaacttgaaaaagtggcaccgagtcggtgctttt

SEQ ID NO: 1547 - RNA, 100 nt, synthetic construct
  source 1..100: mol_type = other RNA
tgctgagctgttaataaaacgttttagagctagaaatagcaagttaaaataaggctagtccgttatcaacttgaaaaagtggcaccgagtcggtgctttt

SEQ ID NO: 1548 - RNA, 100 nt, synthetic construct
  source 1..100: mol_type = other RNA
acttaccctctgacttcatagttttagagctagaaatagcaagttaaaataaggctagtccgttatcaacttgaaaaagtggcaccgagtcggtgctttt

SEQ ID NO: 1549 - RNA, 100 nt, synthetic construct; identical to SEQ ID NO: 1548
  source 1..100: mol_type = other RNA

SEQ ID NO: 1550 - RNA, 100 nt, synthetic construct
  source 1..100: mol_type = other RNA
tcacttacttcatatttcttgttttagagctagaaatagcaagttaaaataaggctagtccgttatcaacttgaaaaagtggcaccgagtcggtgctttt

SEQ ID NO: 1551 - RNA, 100 nt, synthetic construct; identical to SEQ ID NO: 1550
  source 1..100: mol_type = other RNA

SEQ ID NO: 1552 - RNA, 119 nt, synthetic construct
  source 1..119: mol_type = other RNA
gttctgtcttttggtcaggacaaccgtctagctataagtgctgcagggtgtgagaaactcctattgctggacgatgtctcttacgaggcattagcaccattctttacgggccgcctcac

SEQ ID NO: 1553 - RNA, 119 nt, synthetic construct
  source 1..119: mol_type = other RNA
gttctgtcttttggtcaggacaaccgtctagctataagtgctgcagggtgtgagaaactcctattgctggacgatgtctcttacgaggcattagcactttacgggccgcctcactgact

SEQ ID NO: 1554 - RNA, 119 nt, synthetic construct
  source 1..119: mol_type = other RNA
gttctgtcttttggtcaggacaaccgtctagctataagtgctgcagggtgtgagaaactcctattgctggacgatgtctcttacgaggcattagcactacaagatggctcagccgatac

SEQ ID NO: 1555 - RNA, 119 nt, synthetic construct
  source 1..119: mol_type = other RNA
gttctgtcttttggtcaggacaaccgtctagctataagtgctgcagggtgtgagaaactcctattgctggacgatgtctcttacgaggcattagcactcaccatagccaggtctggggg

SEQ ID NO: 1556 - RNA, 119 nt, synthetic construct
  source 1..119: mol_type = other RNA
gttctgtcttttggtcaggacaaccgtctagctataagtgctgcagggtgtgagaaactcctattgctggacgatgtctcttacgaggcattagcactctgagtgagaatctgagctta

SEQ ID NO: 1557 - RNA, 119 nt, synthetic construct
  source 1..119: mol_type = other RNA
gttctgtcttttggtcaggacaaccgtctagctataagtgctgcagggtgtgagaaactcctattgctggacgatgtctcttacgaggcattagcactcactcagagaatcactcaggg

SEQ ID NO: 1558 - RNA, 119 nt, synthetic construct
  source 1..119: mol_type = other RNA
gttctgtcttttggtcaggacaaccgtctagctataagtgctgcagggtgtgagaaactcctattgctggacgatgtctcttacgaggcattagcacctgtggtacctggtgcgaggcc

SEQ ID NO: 1559 - RNA, 119 nt, synthetic construct
  source 1..119: mol_type = other RNA
gttctgtcttttggtcaggacaaccgtctagctataagtgctgcagggtgtgagaaactcctattgctggacgatgtctcttacgaggcattagcactcccaccttcttgggcagaagg

SEQ ID NO: 1560 - RNA, 119 nt, synthetic construct
  source 1..119: mol_type = other RNA
gttctgtcttttggtcaggacaaccgtctagctataagtgctgcagggtgtgagaaactcctattgctggacgatgtctcttacgaggcattagcacccgcacctgcacttccagcaac

SEQ ID NO: 1561 - RNA, 119 nt, synthetic construct
  source 1..119: mol_type = other RNA
gttctgtcttttggtcaggacaaccgtctagctataagtgctgcagggtgtgagaaactcctattgctggacgatgtctcttacgaggcattagcacaggctctgtcggccatgcctac

SEQ ID NO: 1562 - RNA, 119 nt, synthetic construct
  source 1..119: mol_type = other RNA
gttctgtcttttggtcaggacaaccgtctagctataagtgctgcagggtgtgagaaactcctattgctggacgatgtctcttacgaggcattagcacgtggggacactgctgctcccgc

SEQ ID NO: 1563 - RNA, 119 nt, synthetic construct
  source 1..119: mol_type = other RNA
gttctgtcttttggtcaggacaaccgtctagctataagtgctgcagggtgtgagaaactcctattgctggacgatgtctcttacgaggcattagcacatccctcactattctggtcgtg

SEQ ID NO: 1564 - RNA, 119 nt, synthetic construct
  source 1..119: mol_type = other RNA
gttctgtcttttggtcaggacaaccgtctagctataagtgctgcagggtgtgagaaactcctattgctggacgatgtctcttacgaggcattagcactggtcgtgtgattgacatcctg

SEQ ID NO: 1565 - RNA, 119 nt, synthetic construct
  source 1..119: mol_type = other RNA
gttctgtcttttggtcaggacaaccgtctagctataagtgctgcagggtgtgagaaactcctattgctggacgatgtctcttacgaggcattagcactgacccccatgcctttgccagt

SEQ ID NO: 1566 - RNA, 119 nt, synthetic construct
  source 1..119: mol_type = other RNA
gttctgtcttttggtcaggacaaccgtctagctataagtgctgcagggtgtgagaaactcctattgctggacgatgtctcttacgaggcattagcacgagacatggtgtaggtgaagca

SEQ ID NO: 1567 - RNA, 119 nt, synthetic construct
  source 1..119: mol_type = other RNA
gttctgtcttttggtcaggacaaccgtctagctataagtgctgcagggtgtgagaaactcctattgctggacgatgtctcttacgaggcattagcacaaaggaagccagttactcatca

SEQ ID NO: 1568 - RNA, 119 nt, synthetic construct
  source 1..119: mol_type = other RNA
gttctgtcttttggtcaggacaaccgtctagctataagtgctgcagggtgtgagaaactcctattgctggacgatgtctcttacgaggcattagcactgaagggcatgtgcagcagaga

SEQ ID NO: 1569 - RNA, 119 nt, synthetic construct
  source 1..119: mol_type = other RNA
gttctgtcttttggtcaggacaaccgtctagctataagtgctgcagggtgtgagaaactcctattgctggacgatgtctcttacgaggcattagcacttcaagggcctctttatagcga

SEQ ID NO: 1570 - RNA, 119 nt, synthetic construct
  source 1..119: mol_type = other RNA
gttctgtcttttggtcaggacaaccgtctagctataagtgctgcagggtgtgagaaactcctattgctggacgatgtctcttacgaggcattagcacggctgtcggtccatgtaggaga

SEQ ID NO: 1571 - RNA, 119 nt, synthetic construct
  source 1..119: mol_type = other RNA
gttctgtcttttggtcaggacaaccgtctagctataagtgctgcagggtgtgagaaactcctattgctggacgatgtctcttacgaggcattagcaccacaaccccctgcagagtggtg

SEQ ID NO: 1572 - RNA, 100 nt, synthetic construct
  source 1..100: mol_type = other RNA
tgacggccatcctcggcgtcgttttagagctagaaatagcaagttaaaataaggctagtccgttatcaacttgaaaaagtggcaccgagtcggtgctttt

SEQ ID NO: 1573 - RNA, 100 nt, synthetic construct
  source 1..100: mol_type = other RNA
gacggccatcctcggcgtctgttttagagctagaaatagcaagttaaaataaggctagtccgttatcaacttgaaaaagtggcaccgagtcggtgctttt

SEQ ID NO: 1574 - RNA, 100 nt, synthetic construct
  source 1..100: mol_type = other RNA
acggccatcctcggcgtctggttttagagctagaaatagcaagttaaaataaggctagtccgttatcaacttgaaaaagtggcaccgagtcggtgctttt

SEQ ID NO: 1575 - RNA, 100 nt, synthetic construct
  source 1..100: mol_type = other RNA
cgcactcacccgcccaggtcgttttagagctagaaatagcaagttaaaataaggctagtccgttatcaacttgaaaaagtggcaccgagtcggtgctttt

SEQ ID NO: 1576 - RNA, 100 nt, synthetic construct
  source 1..100: mol_type = other RNA
gcactcacccgcccaggtctgttttagagctagaaatagcaagttaaaataaggctagtccgttatcaacttgaaaaagtggcaccgagtcggtgctttt

SEQ ID NO: 1577 - RNA, 99 nt, synthetic construct
  source 1..99: mol_type = other RNA
cccaggctcgcactccatggttttagagctagaaatagcaagttaaaataaggctagtccgttatcaacttgaaaaagtggcaccgagtcggtgctttt

SEQ ID NO: 1578 - RNA, 100 nt, synthetic construct
  source 1..100: mol_type = other RNA
gtcactcaccggcctcgctcgttttagagctagaaatagcaagttaaaataaggctagtccgttatcaacttgaaaaagtggcaccgagtcggtgctttt

SEQ ID NO: 1579 - RNA, 100 nt, synthetic construct
  source 1..100: mol_type = other RNA
ccttaccccatctcagggtggttttagagctagaaatagcaagttaaaataaggctagtccgttatcaacttgaaaaagtggcaccgagtcggtgctttt

SEQ ID NO: 1580 - RNA, 100 nt, synthetic construct
  source 1..100: mol_type = other RNA
cttaccccatctcagggtgagttttagagctagaaatagcaagttaaaataaggctagtccgttatcaacttgaaaaagtggcaccgagtcggtgctttt

SEQ ID NO: 1581 - RNA, 100 nt, synthetic construct
  source 1..100: mol_type = other RNA
ggctctgggaaaagaggggagttttagagctagaaatagcaagttaaaataaggctagtccgttatcaacttgaaaaagtggcaccgagtcggtgctttt

SEQ ID NO: 1582 - RNA, 100 nt, synthetic construct
  source 1..100: mol_type = other RNA
cttcccacagatagaaaagggttttagagctagaaatagcaagttaaaataaggctagtccgttatcaacttgaaaaagtggcaccgagtcggtgctttt

SEQ ID NO: 1583 - RNA, 100 nt, synthetic construct
  source 1..100: mol_type = other RNA
ttcccacagatagaaaaggagttttagagctagaaatagcaagttaaaataaggctagtccgttatcaacttgaaaaagtggcaccgagtcggtgctttt

SEQ ID NO: 1584 - RNA, 100 nt, synthetic construct
  source 1..100: mol_type = other RNA
cccaggcagtgacagtgcccgttttagagctagaaatagcaagttaaaataaggctagtccgttatcaacttgaaaaagtggcaccgagtcggtgctttt

SEQ ID NO: 1585 - RNA, 100 nt, synthetic construct
  source 1..100: mol_type = other RNA
ccaggcagtgacagtgcccagttttagagctagaaatagcaagttaaaataaggctagtccgttatcaacttgaaaaagtggcaccgagtcggtgctttt

SEQ ID NO: 1586 - RNA, 100 nt, synthetic construct
  source 1..100: mol_type = other RNA
gacccgcatctcggcgtctggttttagagctagaaatagcaagttaaaataaggctagtccgttatcaacttgaaaaagtggcaccgagtcggtgctttt

SEQ ID NO: 1587 - RNA, 100 nt, synthetic construct
  source 1..100: mol_type = other RNA
gcactcaccggcccaggtctgttttagagctagaaatagcaagttaaaataaggctagtccgttatcaacttgaaaaagtggcaccgagtcggtgctttt

SEQ ID NO: 1588 - RNA, 100 nt, synthetic construct
  source 1..100: mol_type = other RNA
tgggagcctgggggcgaggagttttagagctagaaatagcaagttaaaataaggctagtccgttatcaacttgaaaaagtggcaccgagtcggtgctttt

SEQ ID NO: 1589 - RNA, 100 nt, synthetic construct
  source 1..100: mol_type = other RNA
gggagcctgggggcgaggaggttttagagctagaaatagcaagttaaaataaggctagtccgttatcaacttgaaaaagtggcaccgagtcggtgctttt

SEQ ID NO: 1590 - RNA, 100 nt, synthetic construct
  source 1..100: mol_type = other RNA
ccccaggctcccactccatggttttagagctagaaatagcaagttaaaataaggctagtccgttatcaacttgaaaaagtggcaccgagtcggtgctttt

SEQ ID NO: 1591 - RNA, 100 nt, synthetic construct
  source 1..100: mol_type = other RNA
ttaccccatctcagggtgaggttttagagctagaaatagcaagttaaaataaggctagtccgttatcaacttgaaaaagtggcaccgagtcggtgctttt

SEQ ID NO: 1592 - RNA, 100 nt, synthetic construct
  source 1..100: mol_type = other RNA
ttcccacaggtggaaaaggagttttagagctagaaatagcaagttaaaataaggctagtccgttatcaacttgaaaaagtggcaccgagtcggtgctttt

SEQ ID NO: 1593 - RNA, 100 nt, synthetic construct
  source 1..100: mol_type = other RNA
tgacccgcatctcggcgtctgttttagagctagaaatagcaagttaaaataaggctagtccgttatcaacttgaaaaagtggcaccgagtcggtgctttt

SEQ ID NO: 1594 - RNA, 100 nt, synthetic construct
  source 1..100: mol_type = other RNA
gcactcacaggcccaggtctgttttagagctagaaatagcaagttaaaataaggctagtccgttatcaacttgaaaaagtggcaccgagtcggtgctttt

SEQ ID NO: 1595 - RNA, 100 nt, synthetic construct
  source 1..100: mol_type = other RNA
cacaggcccaggtctcggtcgttttagagctagaaatagcaagttaaaataaggctagtccgttatcaacttgaaaaagtggcaccgagtcggtgctttt

SEQ ID NO: 1596 - RNA, 100 nt, synthetic construct
  source 1..100: mol_type = other RNA
agaccctggccccgcccccggttttagagctagaaatagcaagttaaaataaggctagtccgttatcaacttgaaaaagtggcaccgagtcggtgctttt

SEQ ID NO: 1597 - RNA, 100 nt, synthetic construct
  source 1..100: mol_type = other RNA
ggctctgggaaaggaggggagttttagagctagaaatagcaagttaaaataaggctagtccgttatcaacttgaaaaagtggcaccgagtcggtgctttt

SEQ ID NO: 1598 - RNA, 100 nt, synthetic construct
  source 1..100: mol_type = other RNA
cccagccagcaacagtgcccgttttagagctagaaatagcaagttaaaataaggctagtccgttatcaacttgaaaaagtggcaccgagtcggtgctttt

SEQ ID NO: 1599 - RNA, 119 nt, synthetic construct
  source 1..119: mol_type = other RNA
gttctgtcttttggtcaggacaaccgtctagctataagtgctgcagggtgtgagaaactcctattgctggacgatgtctcttacgaggcattagcacggaccgggagacacagaagtac

SEQ ID NO: 1600 - RNA, 119 nt, synthetic construct
  source 1..119: mol_type = other RNA
gttctgtcttttggtcaggacaaccgtctagctataagtgctgcagggtgtgagaaactcctattgctggacgatgtctcttacgaggcattagcaccatcgccctgaacgaggacctg

SEQ ID NO: 1601 - RNA, 119 nt, synthetic construct
  source 1..119: mol_type = other RNA
gttctgtcttttggtcaggacaaccgtctagctataagtgctgcagggtgtgagaaactcctattgctggacgatgtctcttacgaggcattagcaccatcgccctgaacgaggatctg

SEQ ID NO: 1602 - RNA, 119 nt, synthetic construct
  source 1..119: mol_type = other RNA
gttctgtcttttggtcaggacaaccgtctagctataagtgctgcagggtgtgagaaactcctattgctggacgatgtctcttacgaggcattagcacttgctggcctggctgtcctagc

SEQ ID NO: 1603 - RNA, 119 nt, synthetic construct; identical to SEQ ID NO: 1600
  source 1..119: mol_type = other RNA

SEQ ID NO: 1604 - RNA, 100 nt, synthetic construct
  source 1..100: mol_type = other RNA
cgggccatggagggcccggggttttagagctagaaatagcaagttaaaataaggctagtccgttatcaacttgaaaaagtggcaccgagtcggtgctttt

SEQ ID NO: 1605 - RNA, 100 nt, synthetic construct
  source 1..100: mol_type = other RNA
gggccatggagggcccgggagttttagagctagaaatagcaagttaaaataaggctagtccgttatcaacttgaaaaagtggcaccgagtcggtgctttt

SEQ ID NO: 1606 - RNA, 100 nt, synthetic construct
  source 1..100: mol_type = other RNA
ggccatggagggcccgggaggttttagagctagaaatagcaagttaaaataaggctagtccgttatcaacttgaaaaagtggcaccgagtcggtgctttt

SEQ ID NO: 1607 - RNA, 100 nt, synthetic construct
  source 1..100: mol_type = other RNA
ctcacctatgactctgagccgttttagagctagaaatagcaagttaaaataaggctagtccgttatcaacttgaaaaagtggcaccgagtcggtgctttt

SEQ ID NO: 1608 - RNA, 100 nt, synthetic construct
  source 1..100: mol_type = other RNA
ttggctggggagaggaggaggttttagagctagaaatagcaagttaaaataaggctagtccgttatcaacttgaaaaagtggcaccgagtcggtgctttt

SEQ ID NO: 1609 - RNA, 100 nt, synthetic construct
  source 1..100: mol_type = other RNA
tggctggggagaggaggagagttttagagctagaaatagcaagttaaaataaggctagtccgttatcaacttgaaaaagtggcaccgagtcggtgctttt

SEQ ID NO: 1610 - RNA, 100 nt, synthetic construct
  source 1..100: mol_type = other RNA
tacactcacagcgtacagaggttttagagctagaaatagcaagttaaaataaggctagtccgttatcaacttgaaaaagtggcaccgagtcggtgctttt

SEQ ID NO: 1611 - RNA, 100 nt, synthetic construct
  source 1..100: mol_type = other RNA
acactcacagcgtacagagagttttagagctagaaatagcaagttaaaataaggctagtccgttatcaacttgaaaaagtggcaccgagtcggtgctttt

SEQ ID NO: 1612 - RNA, 100 nt, synthetic construct
  source 1..100: mol_type = other RNA
ggagggtctgggggaaatgggttttagagctagaaatagcaagttaaaataaggctagtccgttatcaacttgaaaaagtggcaccgagtcggtgctttt

SEQ ID NO: 1613 - RNA, 100 nt, synthetic construct
  source 1..100: mol_type = other RNA
gagggtctgggggaaatggggttttagagctagaaatagcaagttaaaataaggctagtccgttatcaacttgaaaaagtggcaccgagtcggtgctttt

SEQ ID NO: 1614 - RNA, 100 nt, synthetic construct
  source 1..100: mol_type = other RNA
caggctgtggggtaggaggtgttttagagctagaaatagcaagttaaaataaggctagtccgttatcaacttgaaaaagtggcaccgagtcggtgctttt

SEQ ID NO: 1615 - RNA, 100 nt, synthetic construct
  source 1..100: mol_type = other RNA
gggctgtagtgggagagggggttttagagctagaaatagcaagttaaaataaggctagtccgttatcaacttgaaaaagtggcaccgagtcggtgctttt

SEQ ID NO: 1616 - RNA, 100 nt, synthetic construct
  source 1..100: mol_type = other RNA
ggagggctgtagtgggagaggttttagagctagaaatagcaagttaaaataaggctagtccgttatcaacttgaaaaagtggcaccgagtcggtgctttt

SEQ ID NO: 1617 - RNA, 100 nt, synthetic construct
  source 1..100: mol_type = other RNA
tcctacctgctcagtgcatggttttagagctagaaatagcaagttaaaataaggctagtccgttatcaacttgaaaaagtggcaccgagtcggtgctttt

SEQ ID NO: 1618 - RNA, 100 nt, synthetic construct
  source 1..100: mol_type = other RNA
catttcctggaggtagagaggttttagagctagaaatagcaagttaaaataaggctagtccgttatcaacttgaaaaagtggcaccgagtcggtgctttt

SEQ ID NO: 1619 - RNA, 100 nt, synthetic construct
  source 1..100: mol_type = other RNA
gcaaccatggctcgtcgggcgttttagagctagaaatagcaagttaaaataaggctagtccgttatcaacttgaaaaagtggcaccgagtcggtgctttt

SEQ ID NO: 1620 - RNA, 100 nt, synthetic construct
  source 1..100: mol_type = other RNA
actcaccaaagcagtgcagcgttttagagctagaaatagcaagttaaaataaggctagtccgttatcaacttgaaaaagtggcaccgagtcggtgctttt

SEQ ID NO: 1621 - RNA, 100 nt, synthetic construct
  source 1..100: mol_type = other RNA
ctcaccgctgcttgggatacgttttagagctagaaatagcaagttaaaataaggctagtccgttatcaacttgaaaaagtggcaccgagtcggtgctttt

SEQ ID NO: 1622 - RNA, 100 nt, synthetic construct
  source 1..100: mol_type = other RNA
accgcccagacccggagcaggttttagagctagaaatagcaagttaaaataaggctagtccgttatcaacttgaaaaagtggcaccgagtcggtgctttt

SEQ ID NO: 1623 - RNA, 100 nt, synthetic construct
  source 1..100: mol_type = other RNA
gcggggtctgagtgtagagagttttagagctagaaatagcaagttaaaataaggctagtccgttatcaacttgaaaaagtggcaccgagtcggtgctttt

SEQ ID NO: 1624 - RNA, 100 nt, synthetic construct
  source 1..100: mol_type = other RNA
gaggtccagggtctcaggtcgttttagagctagaaatagcaagttaaaataaggctagtccgttatcaacttgaaaaagtggcaccgagtcggtgctttt

SEQ ID NO: 1625 - RNA, 100 nt, synthetic construct
  source 1..100: mol_type = other RNA
gtagaatccagtcagtgagggttttagagctagaaatagcaagttaaaataaggctagtccgttatcaacttgaaaaagtggcaccgagtcggtgctttt

SEQ ID NO: 1626 - RNA, 100 nt, synthetic construct; identical to SEQ ID NO: 1477
  source 1..100: mol_type = other RNA

SEQ ID NO: 1627 - RNA, 100 nt, synthetic construct
  source 1..100: mol_type = other RNA
aggtccagggtctcaggtcagttttagagctagaaatagcaagttaaaataaggctagtccgttatcaacttgaaaaagtggcaccgagtcggtgctttt

SEQ ID NO: 1628 - RNA, 100 nt, synthetic construct; identical to SEQ ID NO: 1472
  source 1..100: mol_type = other RNA

SEQ ID NO: 1629 - RNA, 100 nt, synthetic construct; identical to SEQ ID NO: 1400
  source 1..100: mol_type = other RNA

SEQ ID NO: 1630 - RNA, 100 nt, synthetic construct
  source 1..100: mol_type = other RNA
aagccagttactcatcaggggttttagagctagaaatagcaagttaaaataaggctagtccgttatcaacttgaaaaagtggcaccgagtcggtgctttt

SEQ ID NO: 1631 - RNA, 100 nt, synthetic construct; identical to SEQ ID NO: 1409
  source 1..100: mol_type = other RNA

SEQ ID NO: 1632 - RNA, 100 nt, synthetic construct
  source 1..100: mol_type = other RNA
tgttccgagagctgatctcagttttagagctagaaatagcaagttaaaataaggctagtccgttatcaacttgaaaaagtggcaccgagtcggtgctttt

SEQ ID NO: 1633 - RNA, 100 nt, synthetic construct
  source 1..100: mol_type = other RNA
cccctggagaaagagaagaggttttagagctagaaatagcaagttaaaataaggctagtccgttatcaacttgaaaaagtggcaccgagtcggtgctttt

SEQ ID NO: 1634 - RNA, 100 nt, synthetic construct
  source 1..100: mol_type = other RNA
ccctccaggctgccttcagggttttagagctagaaatagcaagttaaaataaggctagtccgttatcaacttgaaaaagtggcaccgagtcggtgctttt

SEQ ID NO: 1635 - RNA, 100 nt, synthetic construct; identical to SEQ ID NO: 1364
  source 1..100: mol_type = other RNA

SEQ ID NO: 1636 - RNA, 100 nt, synthetic construct
  source 1..100: mol_type = other RNA
ttccgagagctgatctcatggttttagagctagaaatagcaagttaaaataaggctagtccgttatcaacttgaaaaagtggcaccgagtcggtgctttt

SEQ ID NO: 1637 - RNA, 100 nt, synthetic construct; identical to SEQ ID NO: 1424
  source 1..100: mol_type = other RNA

SEQ ID NO: 1638 - RNA, 100 nt, synthetic construct
  source 1..100: mol_type = other RNA
gcacctgtccccctgtgggcgttttagagctagaaatagcaagttaaaataaggctagtccgttatcaacttgaaaaagtggcaccgagtcggtgctttt

SEQ ID NO: 1639 - RNA, 100 nt, synthetic construct
  source 1..100: mol_type = other RNA
ctccccatgagatcagctctgttttagagctagaaatagcaagttaaaataaggctagtccgttatcaacttgaaaaagtggcaccgagtcggtgctttt

SEQ ID NO: 1640 - RNA, 100 nt, synthetic construct
  source 1..100: mol_type = other RNA
ggactctccgcgccccggtggttttagagctagaaatagcaagttaaaataaggctagtccgttatcaacttgaaaaagtggcaccgagtcggtgctttt

SEQ ID NO: 1641 - RNA, 100 nt, synthetic construct
  source 1..100: mol_type = other RNA
tggcccatttcgcagaggcggttttagagctagaaatagcaagttaaaataaggctagtccgttatcaacttgaaaaagtggcaccgagtcggtgctttt

SEQ ID NO: 1642 - RNA, 100 nt, synthetic construct
  source 1..100: mol_type = other RNA
ggatttgcctagcttccccagttttagagctagaaatagcaagttaaaataaggctagtccgttatcaacttgaaaaagtggcaccgagtcggtgctttt

SEQ ID NO: 1643 - RNA, 100 nt, synthetic construct; identical to SEQ ID NO: 1479
  source 1..100: mol_type = other RNA

SEQ ID NO: 1644 - RNA, 100 nt, synthetic construct; identical to SEQ ID NO: 1415
  source 1..100: mol_type = other RNA

SEQ ID NO: 1645 - RNA, 100 nt, synthetic construct
  source 1..100: mol_type = other RNA
gacccagaagccaactatgggttttagagctagaaatagcaagttaaaataaggctagtccgttatcaacttgaaaaagtggcaccgagtcggtgctttt

SEQ ID NO: 1646 - RNA, 100 nt, synthetic construct
  source 1..100: mol_type = other RNA
ttgtgccacagggctgctgcgttttagagctagaaatagcaagttaaaataaggctagtccgttatcaacttgaaaaagtggcaccgagtcggtgctttt

SEQ ID NO: 1647 - RNA, 100 nt, synthetic construct; identical to SEQ ID NO: 1358
  source 1..100: mol_type = other RNA

SEQ ID NO: 1648 - RNA, 100 nt, synthetic construct; identical to SEQ ID NO: 1367
  source 1..100: mol_type = other RNA

SEQ ID NO: 1649 - RNA, 20 nt, synthetic construct
  source 1..20: mol_type = other RNA
ctcgatgcgaggactctcca

SEQ ID NO: 1650 - RNA, 20 nt, synthetic construct
  source 1..20: mol_type = other RNA
tctcgatgcgaggactctcc

SEQ ID NO: 1651 - RNA, 20 nt, synthetic construct
  source 1..20: mol_type = other RNA
catcgagataacctcgtgct

SEQ ID NO: 1652 - RNA, 20 nt, synthetic construct
  source 1..20: mol_type = other RNA
tggccgggctcaggcacgag

SEQ ID NO: 1653 - RNA, 20 nt, synthetic construct
  source 1..20: mol_type = other RNA
gcccactggtaggggtgctg

SEQ ID NO: 1654 - RNA, 20 nt, synthetic construct
  source 1..20: mol_type = other RNA
tgggctcggtggtgggactt

SEQ ID NO: 1655 - RNA, 20 nt, synthetic construct
  source 1..20: mol_type = other RNA
cgagcccactacgagacgga

SEQ ID NO: 1656 - RNA, 20 nt, synthetic construct
  source 1..20: mol_type = other RNA
ctcgtagtgggctcggtggt

SEQ ID NO: 1657 - RNA, 20 nt, synthetic construct
  source 1..20: mol_type = other RNA
gccgtgaaggcgtcggccgg

SEQ ID NO: 1658 - RNA, 20 nt, synthetic construct
  source 1..20: mol_type = other RNA
gtttctgagtttcaggattc

SEQ ID NO: 1659 - RNA, 20 nt, synthetic construct
  source 1..20: mol_type = other RNA
catcgggaggaagaacacac

SEQ ID NO: 1660 - RNA, 20 nt, synthetic construct
  source 1..20: mol_type = other RNA
ggaggaagaacacacgggta

SEQ ID NO: 1661 - RNA, 20 nt, synthetic construct
  source 1..20: mol_type = other RNA
gagcgctgggctgcatcaga

SEQ ID NO: 1662 - RNA, 20 nt, synthetic construct
  source 1..20: mol_type = other RNA
tgatctcgatccgagggctc

SEQ ID NO: 1663 - RNA, 20 nt, synthetic construct
  source 1..20: mol_type = other RNA
acggagtgatctcgatccga

SEQ ID NO: 1664 - RNA, 20 nt, synthetic construct
  source 1..20: mol_type = other RNA
gcggaggcattcgtgcgccg

SEQ ID NO: 1665 - RNA, 20 nt, synthetic construct
  source 1..20: mol_type = other RNA
gccgcgctcagaaacttctg

SEQ ID NO: 1666 - RNA, 20 nt, synthetic construct
  source 1..20: mol_type = other RNA
gggcctcgggcctgagccct

SEQ ID NO: 1667 - RNA, 20 nt, synthetic construct
  source 1..20: mol_type = other RNA
cctcgggctggcggccaccc

SEQ ID NO: 1668 - RNA, 20 nt, synthetic construct
  source 1..20: mol_type = other RNA
ccactcgcccgtgccccgtc

SEQ ID NO: 1669 - RNA, 20 nt, synthetic construct
  source 1..20: mol_type = other RNA
gcattcgtgcgccgaggcct

SEQ ID NO: 1670 - RNA, 20 nt, synthetic construct
  source 1..20: mol_type = other RNA
gagcctcaccccagcgctcc

SEQ ID NO: 1671 - RNA, 20 nt, synthetic construct
  source 1..20: mol_type = other RNA
gaggggctccgggagcgctg

SEQ ID NO: 1672 - RNA, 20 nt, synthetic construct
  source 1..20: mol_type = other RNA
agggctggtcttccacatct

SEQ ID NO: 1673 - RNA, 20 nt, synthetic construct
  source 1..20: mol_type = other RNA
gcggggagcccaggccaaag

SEQ ID NO: 1674 - RNA, 20 nt, synthetic construct
  source 1..20: mol_type = other RNA
gccaccatgaagaccttttg

SEQ ID NO: 1675 - RNA, 20 nt, synthetic construct
  source 1..20: mol_type = other RNA
ttgcggcacacctgagtacc

SEQ ID NO: 1676 - RNA, 20 nt, synthetic construct
  source 1..20: mol_type = other RNA
gtaggagaactgggggaagt

SEQ ID NO: 1677 - RNA, 20 nt, synthetic construct
  source 1..20: mol_type = other RNA
ctcctactcggccagcggca

SEQ ID NO: 1678 - RNA, 20 nt, synthetic construct
  source 1..20: mol_type = other RNA
gaaaaccttctgtgggaccc

SEQ ID NO: 1679 - RNA, 20 nt, synthetic construct
  source 1..20: mol_type = other RNA
agtaggagaactgggggaag

SEQ ID NO: 1680 - RNA, 20 nt, synthetic construct
  source 1..20: mol_type = other RNA
gttgcaagtctgacatttga

SEQ ID NO: 1681 - RNA, 20 nt, synthetic construct
  source 1..20: mol_type = other RNA
gaaacactacctggtacaca

SEQ ID NO: 1682 - RNA, 20 nt, synthetic construct
  source 1..20: mol_type = other RNA
tgtggcagacctacagtgta

SEQ ID NO: 1683 - RNA, 20 nt, synthetic construct
  source 1..20: mol_type = other RNA
gggcacaccttgcattggta

SEQ ID NO: 1684 - RNA, 20 nt, synthetic construct
  source 1..20: mol_type = other RNA
ctgcgcacctggcattcatg

SEQ ID NO: 1685 - RNA, 20 nt, synthetic construct
  source 1..20: mol_type = other RNA
cctaccggtccgcaagcgtc

SEQ ID NO: 1686 - RNA, 20 nt, synthetic construct
  source 1..20: mol_type = other RNA
actcacacatctggataggt

SEQ ID NO: 1687 - RNA, 20 nt, synthetic construct
  source 1..20: mol_type = other RNA
gacttacctagaccttcctg

SEQ ID NO: 1688 - RNA, 20 nt, synthetic construct
  source 1..20: mol_type = other RNA
aatcttacagagctgaaaag

SEQ ID NO: 1689 - RNA, 20 nt, synthetic construct
  source 1..20: mol_type = other RNA
catcatattcttcacttcca

SEQ ID NO: 1690 - RNA, 20 nt, synthetic construct
  source 1..20: mol_type = other RNA
aagaatatgatgttcctccc

SEQ ID NO: 1691 - RNA, 20 nt, synthetic construct
  source 1..20: mol_type = other RNA
cccctaaaccacgaccgcgc

SEQ ID NO: 1692 - RNA, 20 nt, synthetic construct
  source 1..20: mol_type = other RNA
tcctgcgcggtcgtggttta

SEQ ID NO: 1693 - RNA, 20 nt, synthetic construct
  source 1..20: mol_type = other RNA
ccctactctgtgaccaactg

SEQ ID NO: 1694 - RNA, 20 nt, synthetic construct
  source 1..20: mol_type = other RNA
cgcaggcgcgtcttccaggt

SEQ ID NO: 1695 - RNA, 20 nt, synthetic construct
  source 1..20: mol_type = other RNA
gcaccgcaggcgcgtcttcc

SEQ ID NO: 1696 - RNA, 20 nt, synthetic construct
  source 1..20: mol_type = other RNA
gaacaagagcaatgactttg

SEQ ID NO: 1697 - RNA, 20 nt, synthetic construct
  source 1..20: mol_type = other RNA
cacctacctaagaaccatcc

SEQ ID NO: 1698 - RNA, 20 nt, synthetic construct
  source 1..20: mol_type = other RNA
ggggttccagggcctgtctg

SEQ ID NO: 1699 - RNA, 20 nt, synthetic construct
  source 1..20: mol_type = other RNA
gacttgcacaacatgcagaa

SEQ ID NO: 1700 - RNA, 20 nt, synthetic construct
  source 1..20: mol_type = other RNA
ttgccagaagcaagatccca

SEQ ID NO: 1701 - RNA, 20 nt, synthetic construct
  source 1..20: mol_type = other RNA
ccatgaacaaccaaaagaga

SEQ ID NO: 1702 - RNA, 20 nt, synthetic construct
  source 1..20: mol_type = other RNA
tcacccccatccagaagccg

SEQ ID NO: 1703 - RNA, 20 nt, synthetic construct
  source 1..20: mol_type = other RNA
atctggctggtctcgtccag

SEQ ID NO: 1704 - RNA, 20 nt, synthetic construct
  source 1..20: mol_type = other RNA
gatgagcgacctcccggtga

SEQ ID NO: 1705 - RNA, 20 nt, synthetic construct
  source 1..20: mol_type = other RNA
agacagcgatgacgtctctg

SEQ ID NO: 1706 - RNA, 20 nt, synthetic construct
  source 1..20: mol_type = other RNA
acgtctctgaggtggacgcg

SEQ ID NO: 1707 - RNA, 20 nt, synthetic construct
  source 1..20: mol_type = other RNA
ttaggggagagtttctcggc

SEQ ID NO: 1708 - RNA, 20 nt, synthetic construct
  source 1..20: mol_type = other RNA
ggagagtgaggaggaggaag

SEQ ID NO: 1709 - RNA, 20 nt, synthetic construct
  source 1..20: mol_type = other RNA
aaggctccgaatccgaatct

SEQ ID NO: 1710 - RNA, 20 nt, synthetic construct
  source 1..20: mol_type = other RNA
atcgtcactcacgaccggct

SEQ ID NO: 1711 - RNA, 20 nt, synthetic construct
  source 1..20: mol_type = other RNA
tgacagtgaggaggaacaag

SEQ ID NO: 1712 - RNA, 20 nt, synthetic construct
  source 1..20: mol_type = other RNA
cacccgtggttgttacactc

SEQ ID NO: 1713 - RNA, 20 nt, synthetic construct
  source 1..20: mol_type = other RNA
catcagccaggccccgcagg

SEQ ID NO: 1714 - RNA, 20 nt, synthetic construct
  source 1..20: mol_type = other RNA
ggtgtatccatctgagttga

SEQ ID NO: 1715 - RNA, 20 nt, synthetic construct
  source 1..20: mol_type = other RNA
gggtgtatccatctgagttg

SEQ ID NO: 1716 - RNA, 20 nt, synthetic construct
  source 1..20: mol_type = other RNA
gcgcaagaagcagatcgacg

SEQ ID NO: 1717 - RNA, 20 nt, synthetic construct
  source 1..20: mol_type = other RNA
ttactacagcctggccagca

SEQ ID NO: 1718 - RNA, 20 nt, synthetic construct
  source 1..20: mol_type = other RNA
actcacccagcatccccagc

SEQ ID NO: 1719 - RNA, 20 nt, synthetic construct
  source 1..20: mol_type = other RNA
agcgactgcagaaagaagag

SEQ ID NO: 1720 - RNA, 20 nt, synthetic construct
  source 1..20: mol_type = other RNA
cataccagctgagccgtccg

SEQ ID NO: 1721 - RNA, 20 nt, synthetic construct
  source 1..20: mol_type = other RNA
tggaaatctgggggtcagaa

SEQ ID NO: 1722 - RNA, 20 nt, synthetic construct
  source 1..20: mol_type = other RNA
gttacccacctaagcaggtc

SEQ ID NO: 1723 - RNA, 20 nt, synthetic construct
  source 1..20: mol_type = other RNA
ctgccagcggctgaactgtg

SEQ ID NO: 1724 - RNA, 20 nt, synthetic construct
  source 1..20: mol_type = other RNA
cctcccactgcttggagctc

SEQ ID NO: 1725 - RNA, 20 nt, synthetic construct
  source 1..20: mol_type = other RNA
tctgccagcggctgaactgt

SEQ ID NO: 1726 - RNA, 20 nt, synthetic construct
  source 1..20: mol_type = other RNA
gtctgccagcggctgaactg

SEQ ID NO: 1727 - RNA, 20 nt, synthetic construct
  source 1..20: mol_type = other RNA
gaagtgccagggccagctgg

SEQ ID NO: 1728 - RNA, 20 nt, synthetic construct
  source 1..20: mol_type = other RNA
ccatgtgccatccgtccttg

SEQ ID NO: 1729 - RNA, 20 nt, synthetic construct
  source 1..20: mol_type = other RNA
tttgcagccagagctggggc

SEQ ID NO: 1730 - RNA, 20 nt, synthetic construct
  source 1..20: mol_type = other RNA
ggttctgcaatgagacactc

SEQ ID NO: 1731 - RNA, 20 nt, synthetic construct
  source 1..20: mol_type = other RNA
gagctaggagaggagagagc

SEQ ID NO: 1732 - RNA, 20 nt, synthetic construct
  source 1..20: mol_type = other RNA
tcacttacctgagcaaagga

SEQ ID NO: 1733 - RNA, 20 nt, synthetic construct
  source 1..20: mol_type = other RNA
ctcacttacctgagcaaagg

SEQ ID NO: 1734 - RNA, 20 nt, synthetic construct
  source 1..20: mol_type = other RNA
ctgcagctggtggcacagtc

SEQ ID NO: 1735 - RNA, 20 nt, synthetic construct
  source 1..20: mol_type = other RNA
cggccagcactgtgccggcg

SEQ ID NO: 1736 - RNA, 20 nt, synthetic construct
  source 1..20: mol_type = other RNA
atcttccattggattggcaa

SEQ ID NO: 1737 - RNA, 20 nt, synthetic construct
  source 1..20: mol_type = other RNA
gatcttccattggattggca

SEQ ID NO: 1738 - RNA, 20 nt, synthetic construct
  source 1..20: mol_type = other RNA
aacctgagaggggaagcaat

SEQ ID NO: 1739 - RNA, 20 nt, synthetic construct
  source 1..20: mol_type = other RNA
aaacctgagaggggaagcaa

SEQ ID NO: 1740 - RNA, 20 nt, synthetic construct
  source 1..20: mol_type = other RNA
gtgcagagccgtctggtggg

SEQ ID NO: 1741 - RNA, 20 nt, synthetic construct
  source 1..20: mol_type = other RNA
ctcccaccgcagcgagctcc

SEQ ID NO: 1742 - RNA, 20 nt, synthetic construct
  source 1..20: mol_type = other RNA
ctcccaaagttcgtggcact

SEQ ID NO: 1743 - RNA, 20 nt, synthetic construct
  source 1..20: mol_type = other RNA
aggtgcagagccgtctggtg

SEQ ID NO: 1744 - RNA, 20 nt, synthetic construct
  source 1..20: mol_type = other RNA
ggtgcagagccgtctggtgg

SEQ ID NO: 1745 - RNA, 20 nt, synthetic construct
  source 1..20: mol_type = other RNA
tctcccaaagttcgtggcac

SEQ ID NO: 1746 - RNA, 20 nt, synthetic construct
  source 1..20: mol_type = other RNA
tgtcccagtgccacgaactt

SEQ ID NO: 1747 - RNA, 20 nt, synthetic construct
  source 1..20: mol_type = other RNA
aaggtgcagagccgtctggt

SEQ ID NO: 1748 - RNA, 20 nt, synthetic construct
  source 1..20: mol_type = other RNA
tcctatcgagtgctggacgc

SEQ ID NO: 1749 - RNA, 20 nt, synthetic construct
  source 1..20: mol_type = other RNA
caaggtgcagagccgtctgg

SEQ ID NO: 1750 - RNA, 20 nt, synthetic construct
  source 1..20: mol_type = other RNA
ggtgcgccagggggctcagt

SEQ ID NO: 1751 - RNA, 20 nt, synthetic construct
  source 1..20: mol_type = other RNA
gggctgcccactgagccccc

SEQ ID NO: 1752 - RNA, 20 nt, synthetic construct
  source 1..20: mol_type = other RNA
aggtgcgccagggggctcag

SEQ ID NO: 1753 - RNA, 20 nt, synthetic construct
  source 1..20: mol_type = other RNA
ggccaggatccaaaccccgc

SEQ ID NO: 1754 - RNA, 20 nt, synthetic construct
  source 1..20: mol_type = other RNA
cgccagtggattggcccaac

SEQ ID NO: 1755 - RNA, 20 nt, synthetic construct
  source 1..20: mol_type = other RNA
aagaagcagcgccagtggat

SEQ ID NO: 1756 - RNA, 20 nt, synthetic construct
  source 1..20: mol_type = other RNA
aaagacactgggcagatggt

SEQ ID NO: 1757 - RNA, 20 nt, synthetic construct
  source 1..20: mol_type = other RNA
gcttacctggataagctgac

SEQ ID NO: 1758 - RNA, 20 nt, synthetic construct
  source 1..20: mol_type = other RNA
ttccagagctggggaaagaa

SEQ ID NO: 1759 - RNA, 20 nt, synthetic construct
  source 1..20: mol_type = other RNA
atggggctcagaggctgtaa

SEQ ID NO: 1760 - RNA, 20 nt, synthetic construct
  source 1..20: mol_type = other RNA
cttgggtcaggacatcaact

SEQ ID NO: 1761 - RNA, 20 nt, synthetic construct
  source 1..20: mol_type = other RNA
cgatgatcaggatatctaca

SEQ ID NO: 1762 - RNA, 20 nt, synthetic construct
  source 1..20: mol_type = other RNA
cacgcacctggacagctgac

SEQ ID NO: 1763 - RNA, 20 nt, synthetic construct
  source 1..20: mol_type = other RNA
aaacagaggagtcggagaaa

SEQ ID NO: 1764 - RNA, 20 nt, synthetic construct
  source 1..20: mol_type = other RNA
acacaagttcaccagcagaa

SEQ ID NO: 1765 - RNA, 20 nt, synthetic construct
  source 1..20: mol_type = other RNA
gttcagccaaaacctcccca

SEQ ID NO: 1766 - RNA, 20 nt, synthetic construct
  source 1..20: mol_type = other RNA
atacaagtccaggagatctt

SEQ ID NO: 1767 - RNA, 20 nt, synthetic construct
  source 1..20: mol_type = other RNA
ttcagcaccagcctcagaag

SEQ ID NO: 1768 - RNA, 20 nt, synthetic construct
  source 1..20: mol_type = other RNA
ggagtctgagagatggagag

SEQ ID NO: 1769 - RNA, 20 nt, synthetic construct
  source 1..20: mol_type = other RNA
ttctctctggaagggcacaa

SEQ ID NO: 1770 - RNA, 20 nt, synthetic construct
  source 1..20: mol_type = other RNA
gacgttacctcgtgcggccc

SEQ ID NO: 1771 - RNA, 20 nt, synthetic construct
  source 1..20: mol_type = other RNA
cctgcagagaaacacacttg

SEQ ID NO: 1772 - RNA, 20 nt, synthetic construct
  source 1..20: mol_type = other RNA
cagttccaaaccctggtggt

SEQ ID NO: 1773 - RNA, 20 nt, synthetic construct
  source 1..20: mol_type = other RNA
ggacccagactagcagcacc

SEQ ID NO: 1774 - RNA, 20 nt, synthetic construct
  source 1..20: mol_type = other RNA
cttacctgggctggggaaga

SEQ ID NO: 1775 - RNA, 20 nt, synthetic construct
  source 1..20: mol_type = other RNA
ttcgtatctgtaaaaccaag

SEQ ID NO: 1776 - RNA, 20 nt, synthetic construct
  source 1..20: mol_type = other RNA
tttcaaaacctgtcagtgat

SEQ ID NO: 1777 - RNA, 20 nt, synthetic construct
  source 1..20: mol_type = other RNA
ttcaaaacctgtcagtgatt

SEQ ID NO: 1778 - RNA, 20 nt, synthetic construct
  source 1..20: mol_type = other RNA
ccatcggctcgcggcgagaa

SEQ ID NO: 1779 - RNA, 20 nt, synthetic construct
  source 1..20: mol_type = other RNA
cctgtctgggagagagaagc

SEQ ID NO: 1780 - RNA, 20 nt, synthetic construct
  source 1..20: mol_type = other RNA
gctcacctggctgagcagcc

SEQ ID NO: 1781 - RNA, 20 nt, synthetic construct
  source 1..20: mol_type = other RNA
ctcacctggctgagcagcca

SEQ ID NO: 1782 - RNA, 20 nt, synthetic construct
  source 1..20: mol_type = other RNA
accaagttctggaacaaaag

SEQ ID NO: 1783 - RNA, 20 nt, synthetic construct
  source 1..20: mol_type = other RNA
gccaacctacagaaaaattg

SEQ ID NO: 1784 - RNA, 20 nt, synthetic construct
  source 1..20: mol_type = other RNA
ccaacctacagaaaaattga

SEQ ID NO: 1785 - RNA, 20 nt, synthetic construct
  source 1..20: mol_type = other RNA
agccttgcaggtgaagagac

SEQ ID NO: 1786 - RNA, 20 nt, synthetic construct
  source 1..20: mol_type = other RNA
ctcaactctttcttgtcttc

SEQ ID NO: 1787 - RNA, 20 nt, synthetic construct
  source 1..20: mol_type = other RNA
tcaactctttcttgtcttca

SEQ ID NO: 1788 - RNA, 20 nt, synthetic construct
  source 1..20: mol_type = other RNA
cactacttcaaggggagcag

SEQ ID NO: 1789 - RNA, 20 nt, synthetic construct
  source 1..20: mol_type = other RNA
acctaccgatgtgctcccgc

SEQ ID NO: 1790 - RNA, 20 nt, synthetic construct
  source 1..20: mol_type = other RNA
ctggcgtctggggtgagata

SEQ ID NO: 1791 - RNA, 20 nt, synthetic construct
  source 1..20: mol_type = other RNA
gagttaccttgtggcatggc

SEQ ID NO: 1792 - RNA, 20 nt, synthetic construct
  source 1..20: mol_type = other RNA
atcctaccttgcagggatct

SEQ ID NO: 1793 - RNA, 20 nt, synthetic construct
  source 1..20: mol_type = other RNA
tcacgtgaaagggtagacca

SEQ ID NO: 1794 - RNA, 20 nt, synthetic construct
  source 1..20: mol_type = other RNA
atctacctgggcatagttca

SEQ ID NO: 1795 - RNA, 20 nt, synthetic construct
  source 1..20: mol_type = other RNA
tgattacctgtccccaccaa

SEQ ID NO: 1796 - RNA, 20 nt, synthetic construct
  source 1..20: mol_type = other RNA
ccccaatctgccaaggaatg

SEQ ID NO: 1797 - RNA, 20 nt, synthetic construct
  source 1..20: mol_type = other RNA
ccatacctcagaggagaaca

SEQ ID NO: 1798 - RNA, 20 nt, synthetic construct
  source 1..20: mol_type = other RNA
caagctcctgggcagagatg

SEQ ID NO: 1799 - RNA, 20 nt, synthetic construct
  source 1..20: mol_type = other RNA
ttatctagaaatgaacccaa

SEQ ID NO: 1800 - RNA, 20 nt, synthetic construct
  source 1..20: mol_type = other RNA
tgggcatggccacagacgac

SEQ ID NO: 1801 - RNA, 20 nt, synthetic construct
  source 1..20: mol_type = other RNA
ctgctcaccggagcgggatg

SEQ ID NO: 1802 - RNA, 20 nt, synthetic construct
  source 1..20: mol_type = other RNA
cagttgttccaacctagcat

SEQ ID NO: 1803 - RNA, 20 nt, synthetic construct
  source 1..20: mol_type = other RNA
cactcccagggctgcgggga

SEQ ID NO: 1804 - RNA, 20 nt, synthetic construct
  source 1..20: mol_type = other RNA
ccactcccagggctgcgggg

SEQ ID NO: 1805 - RNA, 20 nt, synthetic construct
  source 1..20: mol_type = other RNA
gcgacgacagctgaagcaga

SEQ ID NO: 1806 - RNA, 20 nt, synthetic construct
  source 1..20: mol_type = other RNA
ggagagccagcctctgccgg

SEQ ID NO: 1807 - RNA, 20 nt, synthetic construct
  source 1..20: mol_type = other RNA
acatgagccagagaggggcg

SEQ ID NO: 1808 - RNA, 20 nt, synthetic construct
  source 1..20: mol_type = other RNA
gaggcagcaagaacctttca

SEQ ID NO: 1809 - RNA, 20 nt, synthetic construct
  source 1..20: mol_type = other RNA
tggcccacactcctggcggg

SEQ ID NO: 1810 - RNA, 20 nt, synthetic construct
  source 1..20: mol_type = other RNA
cgttggcccacactcctggc

SEQ ID NO: 1811 - RNA, 20 nt, synthetic construct
  source 1..20: mol_type = other RNA
ctgggactcttgggcactcc

SEQ ID NO: 1812 - RNA, 20 nt, synthetic construct
  source 1..20: mol_type = other RNA
tgcgtgcctggaggggagat

SEQ ID NO: 1813 - RNA, 20 nt, synthetic construct
  source 1..20: mol_type = other RNA
ctgcgtgcctggaggggaga

SEQ ID NO: 1814 - RNA, 20 nt, synthetic construct
  source 1..20: mol_type = other RNA
ggtgattctgacagggcaag

SEQ ID NO: 1815 - RNA, 20 nt, synthetic construct
  source 1..20: mol_type = other RNA
aagcctagcggggtgggcag

SEQ ID NO: 1816 - RNA, 20 nt, synthetic construct
  source 1..20: mol_type = other RNA
cggactcacctggaacatgc

SEQ ID NO: 1817 - RNA, 20 nt, synthetic construct
  source 1..20: mol_type = other RNA
agccctagggagtcatatga

SEQ ID NO: 1818 - RNA, 20 nt, synthetic construct
  source 1..20: mol_type = other RNA
cagccctagggagtcatatg

SEQ ID NO: 1819 - RNA, 20 nt, synthetic construct
  source 1..20: mol_type = other RNA
tctcacctgcagggtgcagt

SEQ ID NO: 1820 - RNA, 20 nt, synthetic construct
  source 1..20: mol_type = other RNA
gtctcacctgcagggtgcag

SEQ ID NO: 1821 - RNA, 20 nt, synthetic construct
  source 1..20: mol_type = other RNA
cacagcctgaggagaggcaa

SEQ ID NO: 1822 - RNA, 20 nt, synthetic construct
  source 1..20: mol_type = other RNA
gcacagcctgaggagaggca

SEQ ID NO: 1823 - RNA, 20 nt, synthetic construct
  source 1..20: mol_type = other RNA
gcactggaggacagggaaga

SEQ ID NO: 1824 - RNA, 20 nt, synthetic construct
  source 1..20: mol_type = other RNA
ggcactggaggacagggaag

SEQ ID NO: 1825 - RNA, 20 nt, synthetic construct
  source 1..20: mol_type = other RNA
cacccacctctggggtgtcc

SEQ ID NO: 1826 - RNA, 20 nt, synthetic construct
  source 1..20: mol_type = other RNA
gcacctaggaggtccagaag

SEQ ID NO: 1827 - RNA, 20 nt, synthetic construct
  source 1..20: mol_type = other RNA
cccttacccagctggtggac

SEQ ID NO: 1828 - RNA, 20 nt, synthetic construct
  source 1..20: mol_type = other RNA
cttcactatcagggggtatg

SEQ ID NO: 1829 - RNA, 20 nt, synthetic construct
  source 1..20: mol_type = other RNA
tcacttacaggtagcttcag

SEQ ID NO: 1830 - RNA, 20 nt, synthetic construct
  source 1..20: mol_type = other RNA
gttcactgcatgcaaggttg

SEQ ID NO: 1831 - RNA, 20 nt, synthetic construct
  source 1..20: mol_type = other RNA
tgttcactgcatgcaaggtt

SEQ ID NO: 1832 - RNA, 20 nt, synthetic construct
  source 1..20: mol_type = other RNA
ctgttcactgcatgcaaggt

SEQ ID NO: 1833 - RNA, 20 nt, synthetic construct
  source 1..20: mol_type = other RNA
ctctcctgtggggggccaga

SEQ ID NO: 1834 - RNA, 20 nt, synthetic construct
  source 1..20: mol_type = other RNA
actctcctgtggggggccag

SEQ ID NO: 1835 - RNA, 20 nt, synthetic construct
  source 1..20: mol_type = other RNA
gcaacttgagggagagagaa

SEQ ID NO: 1836 - RNA, 20 nt, synthetic construct
  source 1..20: mol_type = other RNA
aggtactggggagccaaggc

SEQ ID NO: 1837 - RNA, 20 nt, synthetic construct
  source 1..20: mol_type = other RNA
acctaccacatcgctcttgc

SEQ ID NO: 1838 - RNA, 20 nt, synthetic construct
  source 1..20: mol_type = other RNA
ggaccactgtgaggggcaga

SEQ ID NO: 1839 - RNA, 20 nt, synthetic construct
  source 1..20: mol_type = other RNA
aggaccactgtgaggggcag

SEQ ID NO: 1840 - RNA, 20 nt, synthetic construct
  source 1..20: mol_type = other RNA
atacctagggcagcaaaatg

SEQ ID NO: 1841 - RNA, 20 nt, synthetic construct
  source 1..20: mol_type = other RNA
gaggcatggctgaaatcttc

SEQ ID NO: 1842 - RNA, 20 nt, synthetic construct
  source 1..20: mol_type = other RNA
tctacctgtttgccaggggg

SEQ ID NO: 1843 - RNA, 20 nt, synthetic construct
  source 1..20: mol_type = other RNA
gactctacctgtttgccagg

SEQ ID NO: 1844 - RNA, 20 nt, synthetic construct
  source 1..20: mol_type = other RNA
agtcctgggaagcagagacg

SEQ ID NO: 1845 - RNA, 20 nt, synthetic construct
  source 1..20: mol_type = other RNA
gagtcctgggaagcagagac

SEQ ID NO: 1846 - RNA, 20 nt, synthetic construct
  source 1..20: mol_type = other RNA
tgagtcctgggaagcagaga

SEQ ID NO: 1847 - RNA, 20 nt, synthetic construct
  source 1..20: mol_type = other RNA
acttaccaggtgcagggtgt

SEQ ID NO: 1848 - RNA, 19 nt, synthetic construct
  source 1..19: mol_type = other RNA
ggtagacaattgcagcctg

SEQ ID NO: 1849 - RNA, 20 nt, synthetic construct
  source 1..20: mol_type = other RNA
gcctccccagctcagacctg

SEQ ID NO: 1850 - RNA, 20 nt, synthetic construct
  source 1..20: mol_type = other RNA
tccctacagacagagccaca

SEQ ID NO: 1851 - RNA, 20 nt, synthetic construct
  source 1..20: mol_type = other RNA
gagccacaaggtaatcctga

SEQ ID NO: 1852 - RNA, 20 nt, synthetic construct
  source 1..20: mol_type = other RNA
gcccaagagttgcggcgtat

SEQ ID NO: 1853 - RNA, 20 nt, synthetic construct
  source 1..20: mol_type = other RNA
aaaatacctgaaacaacaaa

SEQ ID NO: 1854 - RNA, 20 nt, synthetic construct
  source 1..20: mol_type = other RNA
caatgactgcaaagatacaa

SEQ ID NO: 1855 - RNA, 20 nt, synthetic construct
  source 1..20: mol_type = other RNA
acaatgactgcaaagataca

SEQ ID NO: 1856 - RNA, 20 nt, synthetic construct
  source 1..20: mol_type = other RNA
aatgactgcatgcaaacacc

SEQ ID NO: 1857 - RNA, 20 nt, synthetic construct
  source 1..20: mol_type = other RNA
atgactgcatgcaaacacca

SEQ ID NO: 1858 - RNA, 20 nt, synthetic construct
  source 1..20: mol_type = other RNA
tgactgcatgcaaacaccag

SEQ ID NO: 1859 - RNA, 20 nt, synthetic construct
  source 1..20: mol_type = other RNA
tactcaccttcaggtcccga

SEQ ID NO: 1860 - RNA, 20 nt, synthetic construct
  source 1..20: mol_type = other RNA
actcaccaaaccacgcctgc

SEQ ID NO: 1861 - RNA, 20 nt, synthetic construct
  source 1..20: mol_type = other RNA
taacttacctttactccatc

SEQ ID NO: 1862 - RNA, 20 nt, synthetic construct
  source 1..20: mol_type = other RNA
aggtataccagcgctggggt

SEQ ID NO: 1863 - RNA, 20 nt, synthetic construct
  source 1..20: mol_type = other RNA
tgaataccttgtttccatca

SEQ ID NO: 1864 - RNA, 20 nt, synthetic construct
  source 1..20: mol_type = other RNA
ctgaataccttgtttccatc

SEQ ID NO: 1865 - RNA, 20 nt, synthetic construct
  source 1..20: mol_type = other RNA
tcgtgctaaaggcaaaaata

SEQ ID NO: 1866 - RNA, 20 nt, synthetic construct
  source 1..20: mol_type = other RNA
agctcaccatcgtgggcctg

SEQ ID NO: 1867 - RNA, 20 nt, synthetic construct
  source 1..20: mol_type = other RNA
aagctcaccatcgtgggcct

SEQ ID NO: 1868 - RNA, 20 nt, synthetic construct
  source 1..20: mol_type = other RNA
aaagctcaccatcgtgggcc

SEQ ID NO: 1869 - RNA, 20 nt, synthetic construct
  source 1..20: mol_type = other RNA
atcctagtcagaggaggaaa

SEQ ID NO: 1870 - RNA, 20 nt, synthetic construct
  source 1..20: mol_type = other RNA
gttatcctggggttgtgtac

SEQ ID NO: 1871 - RNA, 20 nt, synthetic construct
  source 1..20: mol_type = other RNA
gaaccttcaaaggaccaaga

SEQ ID NO: 1872 - RNA, 20 nt, synthetic construct
  source 1..20: mol_type = other RNA
tcacccgctccaccctttcc

SEQ ID NO: 1873 - RNA, 20 nt, synthetic construct
  source 1..20: mol_type = other RNA
ataatctaagtcaaaataaa

SEQ ID NO: 1874 - RNA, 20 nt, synthetic construct
  source 1..20: mol_type = other RNA
agtccatctttttaaaaggc

SEQ ID NO: 1875 - RNA, 20 nt, synthetic construct
  source 1..20: mol_type = other RNA
catgaccctgtggtgggaaa

SEQ ID NO: 1876 - RNA, 20 nt, synthetic construct
  source 1..20: mol_type = other RNA
ttaccatttgaaaattcatc

SEQ ID NO: 1877 - RNA, 20 nt, synthetic construct
  source 1..20: mol_type = other RNA
catacagtcagtatcaattc

SEQ ID NO: 1878 - RNA, 20 nt, synthetic construct
  source 1..20: mol_type = other RNA
ggtgtcgaaatgagaagaag

SEQ ID NO: 1879 - RNA, 20 nt, synthetic construct
  source 1..20: mol_type = other RNA
atgcaggtgacagagactct

SEQ ID NO: 1880 - RNA, 20 nt, synthetic construct
  source 1..20: mol_type = other RNA
tggggagcaggaaatatctg

SEQ ID NO: 1881 - RNA, 20 nt, synthetic construct
  source 1..20: mol_type = other RNA
tctcaaaaccaaagatctcc

SEQ ID NO: 1882 - RNA, 20 nt, synthetic construct
  source 1..20: mol_type = other RNA
caacacaaccctgacctgtg

SEQ ID NO: 1883 - RNA, 20 nt, synthetic construct
  source 1..20: mol_type = other RNA
tcaccaaaaggaaaaaacag

SEQ ID NO: 1884 - RNA, 20 nt, synthetic construct
  source 1..20: mol_type = other RNA
agccttaccttgcgagagaa

SEQ ID NO: 1885 - RNA, 20 nt, synthetic construct
  source 1..20: mol_type = other RNA
tagccttaccttgcgagaga

SEQ ID NO: 1886 - RNA, 20 nt, synthetic construct
  source 1..20: mol_type = other RNA
tcgcaaggtaaggctactcc

SEQ ID NO: 1887 - RNA, 20 nt, synthetic construct
  source 1..20: mol_type = other RNA
ggcacactgtgggggaaggg

SEQ ID NO: 1888 - RNA, 20 nt, synthetic construct
  source 1..20: mol_type = other RNA
gtgccagagctgtgtggagc

SEQ ID NO: 1889 - RNA, 20 nt, synthetic construct
  source 1..20: mol_type = other RNA
ccgacacacaagctctgttg

SEQ ID NO: 1890 - RNA, 20 nt, synthetic construct
  source 1..20: mol_type = other RNA
ggtctatcaggtgagcgttg

SEQ ID NO: 1891 - RNA, 20 nt, synthetic construct
  source 1..20: mol_type = other RNA
gatgctcagtacagccacct

SEQ ID NO: 1892 - RNA, 20 nt, synthetic construct
  source 1..20: mol_type = other RNA
ccgactgcatctttgtttca

SEQ ID NO: 1893 - RNA, 20 nt, synthetic construct
  source 1..20: mol_type = other RNA
actcacctgataagaggcag

SEQ ID NO: 1894 - RNA, 20 nt, synthetic construct
  source 1..20: mol_type = other RNA
taccacctgaaaatgaaaaa

SEQ ID NO: 1895 - RNA, 20 nt, synthetic construct
  source 1..20: mol_type = other RNA
acacagacacgtgagtttat

SEQ ID NO: 1896 - RNA, 20 nt, synthetic construct
  source 1..20: mol_type = other RNA
tatatgctggggagaaagaa

SEQ ID NO: 1897 - RNA, 20 nt, synthetic construct
  source 1..20: mol_type = other RNA
ttatatgctggggagaaaga

SEQ ID NO: 1898 - RNA, 20 nt, synthetic construct
  source 1..20: mol_type = other RNA
ctggattacctcttgccctc

SEQ ID NO: 1899 - RNA, 20 nt, synthetic construct
  source 1..20: mol_type = other RNA
acactgtggggggtggggtg

SEQ ID NO: 1900 - RNA, 20 nt, synthetic construct
  source 1..20: mol_type = other RNA
cacactgtggggggtggggt

SEQ ID NO: 1901 - RNA, 20 nt, synthetic construct
  source 1..20: mol_type = other RNA
acacactgtggggggtgggg

SEQ ID NO: 1902 - RNA, 20 nt, synthetic construct
  source 1..20: mol_type = other RNA
ttgtcctgcggaggaaggag

SEQ ID NO: 1903 - RNA, 20 nt, synthetic construct
  source 1..20: mol_type = other RNA
tttgtcctgcggaggaagga

SEQ ID NO: 1904 - RNA, 20 nt, synthetic construct
  source 1..20: mol_type = other RNA
ttttgtcctgcggaggaagg

SEQ ID NO: 1905 - RNA, 20 nt, synthetic construct
  source 1..20: mol_type = other RNA
gttacctcatagtctgggtt

SEQ ID NO: 1906 - RNA, 20 nt, synthetic construct
  source 1..20: mol_type = other RNA
cgttacctcatagtctgggt

SEQ ID NO: 1907 - RNA, 20 nt, synthetic construct
  source 1..20: mol_type = other RNA
catggaacaggggaagggcc

SEQ ID NO: 1908 - RNA, 20 nt, synthetic construct
  source 1..20: mol_type = other RNA
cttcaaggtaagggcctact

SEQ ID NO: 1909 - RNA, 20 nt, synthetic construct
  source 1..20: mol_type = other RNA
tctcctacctttgattgact

SEQ ID NO: 1910 - RNA, 20 nt, synthetic construct
  source 1..20: mol_type = other RNA
ttctcctacctttgattgac

SEQ ID NO: 1911 - RNA, 20 nt, synthetic construct
  source 1..20: mol_type = other RNA
tggcccagtcaatcaaaggt

SEQ ID NO: 1912 - RNA, 20 nt, synthetic construct
  source 1..20: mol_type = other RNA
acatacttctgtaatacact

SEQ ID NO: 1913 - RNA, 20 nt, synthetic construct
  source 1..20: mol_type = other RNA
tgactatcaagaagatggtt

SEQ ID NO: 1914 - RNA, 20 nt, synthetic construct
  source 1..20: mol_type = other RNA
tttaaaccatgtgatatttt

SEQ ID NO: 1915 - RNA, 20 nt, synthetic construct
  source 1..20: mol_type = other RNA
ctcttccattgggtacataa

SEQ ID NO: 1916 - RNA, 20 nt, synthetic construct
  source 1..20: mol_type = other RNA
tgaccagctctaccaggtaa

SEQ ID NO: 1917 - RNA, 20 nt, synthetic construct
  source 1..20: mol_type = other RNA
gaccagtacagccaccttca

SEQ ID NO: 1918 - RNA, 20 nt, synthetic construct
  source 1..20: mol_type = other RNA
accttcaaggaaaccagttg

SEQ ID NO: 1919 - RNA, 20 nt, synthetic construct
  source 1..20: mol_type = other RNA
ggttcattgtggccttgccg

SEQ ID NO: 1920 - RNA, 20 nt, synthetic construct
  source 1..20: mol_type = other RNA
gagcgctaagtggaaaagaa

SEQ ID NO: 1921 - RNA, 20 nt, synthetic construct
  source 1..20: mol_type = other RNA
aaccctacctttagttaaga

SEQ ID NO: 1922 - RNA, 20 nt, synthetic construct
  source 1..20: mol_type = other RNA
ggcagtcactgtggagggaa

SEQ ID NO: 1923 - RNA, 20 nt, synthetic construct
  source 1..20: mol_type = other RNA
tggaaagctggaggtgggaa

SEQ ID NO: 1924 - RNA, 20 nt, synthetic construct
  source 1..20: mol_type = other RNA
cctcacctctcatcaccacc

SEQ ID NO: 1925 - RNA, 20 nt, synthetic construct
  source 1..20: mol_type = other RNA
agtggctgcagaggaacgag

SEQ ID NO: 1926 - RNA, 20 nt, synthetic construct
  source 1..20: mol_type = other RNA
gcgctgtccagggacaagaa

SEQ ID NO: 1927 - RNA, 20 nt, synthetic construct
  source 1..20: mol_type = other RNA
tccttactgaggacactggc

SEQ ID NO: 1928 - RNA, 20 nt, synthetic construct
  source 1..20: mol_type = other RNA
ccatctggagcttagggtcc

SEQ ID NO: 1929 - RNA, 20 nt, synthetic construct
  source 1..20: mol_type = other RNA
ggttggcatgtggaggcagc

SEQ ID NO: 1930 - RNA, 20 nt, synthetic construct
  source 1..20: mol_type = other RNA
gggtcataccagctgagccg

SEQ ID NO: 1931 - RNA, 20 nt, synthetic construct
  source 1..20: mol_type = other RNA
ctccagagcccacaggtaag

SEQ ID NO: 1932 - RNA, 20 nt, synthetic construct
  source 1..20: mol_type = other RNA
accacaactccagagcccac

SEQ ID NO: 1933 - RNA, 20 nt, synthetic construct
  source 1..20: mol_type = other RNA
tgaggcccaggacaagaccc

SEQ ID NO: 1934 - RNA, 20 nt, synthetic construct
  source 1..20: mol_type = other RNA
tttccagcccaaggtgcaga

SEQ ID NO: 1935 - RNA, 20 nt, synthetic construct
  source 1..20: mol_type = other RNA
gcgccagtggattggcccaa

SEQ ID NO: 1936 - RNA, 20 nt, synthetic construct
  source 1..20: mol_type = other RNA
aaggccatgacgcgctcccc

SEQ ID NO: 1937 - RNA, 20 nt, synthetic construct
  source 1..20: mol_type = other RNA
tcacggagcagcaaggccag

SEQ ID NO: 1938 - RNA, 20 nt, synthetic construct
  source 1..20: mol_type = other RNA
cgcggacctggcaggaagac

SEQ ID NO: 1939 - RNA, 20 nt, synthetic construct
  source 1..20: mol_type = other RNA
tcacctgcgccccccgccgc

SEQ ID NO: 1940 - RNA, 20 nt, synthetic construct
  source 1..20: mol_type = other RNA
cttactgtggttgcagtaaa

SEQ ID NO: 1941 - RNA, 20 nt, synthetic construct
  source 1..20: mol_type = other RNA
acttactgtggttgcagtaa

SEQ ID NO: 1942 - RNA, 20 nt, synthetic construct
  source 1..20: mol_type = other RNA
ttggccatagggctccaggc

SEQ ID NO: 1943 - RNA, 20 nt, synthetic construct
  source 1..20: mol_type = other RNA
gttggccatagggctccagg

SEQ ID NO: 1944 - RNA, 20 nt, synthetic construct
  source 1..20: mol_type = other RNA
gcgccagcagtggagcggtc

SEQ ID NO: 1945 - RNA, 20 nt, synthetic construct
  source 1..20: mol_type = other RNA
aattaccttgttgcaaggta

SEQ ID NO: 1946 - RNA, 20 nt, synthetic construct
  source 1..20: mol_type = other RNA
ctatcagccactaatgaagt

SEQ ID NO: 1947 - RNA, 20 nt, synthetic construct
  source 1..20: mol_type = other RNA
ctgctccaaagaagaatcta

SEQ ID NO: 1948 - RNA, 20 nt, synthetic construct
  source 1..20: mol_type = other RNA
actatcaatcttgcccagac

SEQ ID NO: 1949 - RNA, 20 nt, synthetic construct
  source 1..20: mol_type = other RNA
ttttccagaatactgaaaca

SEQ ID NO: 1950 - RNA, 20 nt, synthetic construct
  source 1..20: mol_type = other RNA
gttttccagaatactgaaac

SEQ ID NO: 1951 - RNA, 20 nt, synthetic construct
  source 1..20: mol_type = other RNA
ttacctgtagatattcttgc

SEQ ID NO: 1952 - RNA, 20 nt, synthetic construct
  source 1..20: mol_type = other RNA
ctcaccccaagtgactcgag

SEQ ID NO: 1953 - RNA, 20 nt, synthetic construct
  source 1..20: mol_type = other RNA
gtgcatccagcgcttcgcac

SEQ ID NO: 1954 - RNA, 20 nt, synthetic construct
  source 1..20: mol_type = other RNA
gagctgcagctgaatcacac

SEQ ID NO: 1955 - RNA, 20 nt, synthetic construct
  source 1..20: mol_type = other RNA
ctggcaggggggcccagcac

SEQ ID NO: 1956 - RNA, 20 nt, synthetic construct
  source 1..20: mol_type = other RNA
ctcccagcgcctgacgcccc

SEQ ID NO: 1957 - RNA, 20 nt, synthetic construct
  source 1..20: mol_type = other RNA
ccccctgccagtatagcctg

SEQ ID NO: 1958 - RNA, 20 nt, synthetic construct
  source 1..20: mol_type = other RNA
cccccctgccagtatagcct

SEQ ID NO: 1959 - RNA, 20 nt, synthetic construct
  source 1..20: mol_type = other RNA
tgagcccatcccgccagtcc

SEQ ID NO: 1960 - RNA, 20 nt, synthetic construct
  source 1..20: mol_type = other RNA
tcaccagccccagcaggcag

SEQ ID NO: 1961 - RNA, 20 nt, synthetic construct
  source 1..20: mol_type = other RNA
aagtactggggacacagagc

SEQ ID NO: 1962 - RNA, 20 nt, synthetic construct
  source 1..20: mol_type = other RNA
acttcacctgggcaaggcag

SEQ ID NO: 1963 - RNA, 20 nt, synthetic construct
  source 1..20: mol_type = other RNA
cacttcacctgggcaaggca

SEQ ID NO: 1964 - RNA, 20 nt, synthetic construct
  source 1..20: mol_type = other RNA
ccgcacacctcctggtacac

SEQ ID NO: 1965 - RNA, 20 nt, synthetic construct
  source 1..20: mol_type = other RNA
agccctgcaagggcagaatg

SEQ ID NO: 1966 - RNA, 20 nt, synthetic construct
  source 1..20: mol_type = other RNA
ccaggagctgtggggagagg

SEQ ID NO: 1967 - RNA, 20 nt, synthetic construct
  source 1..20: mol_type = other RNA
gttcttaccagagagcagga

SEQ ID NO: 1968 - RNA, 20 nt, synthetic construct
  source 1..20: mol_type = other RNA
gcacctaaaaaagaaggtta

SEQ ID NO: 1969 - RNA, 20 nt, synthetic construct
  source 1..20: mol_type = other RNA
ttggcaggaccaggaaaact

SEQ ID NO: 1970 - RNA, 20 nt, synthetic construct
  source 1..20: mol_type = other RNA
caatcttcagatcaaggaca

SEQ ID NO: 1971 - RNA, 20 nt, synthetic construct
  source 1..20: mol_type = other RNA
gtaatccaaggaatgtggtc

SEQ ID NO: 1972 - RNA, 20 nt, synthetic construct
  source 1..20: mol_type = other RNA
agagtgaacagaccaagaaa

SEQ ID NO: 1973 - RNA, 20 nt, synthetic construct
  source 1..20: mol_type = other RNA
ggacatccagtctggtggtg

SEQ ID NO: 1974 - RNA, 20 nt, synthetic construct
  source 1..20: mol_type = other RNA
aatgcatcctggaatggaaa

SEQ ID NO: 1975 - RNA, 20 nt, synthetic construct
  source 1..20: mol_type = other RNA
gcactcacctgtgaatagaa

SEQ ID NO: 1976 - RNA, 20 nt, synthetic construct
  source 1..20: mol_type = other RNA
taaaacagctgagacttaaa

SEQ ID NO: 1977 - RNA, 20 nt, synthetic construct
  source 1..20: mol_type = other RNA
gcttcctacaagaaaaggtc

SEQ ID NO: 1978 - RNA, 20 nt, synthetic construct
  source 1..20: mol_type = other RNA
ttacccagaccttttcttgt

SEQ ID NO: 1979 - RNA, 20 nt, synthetic construct
  source 1..20: mol_type = other RNA
cagcatttccacaggacaga

SEQ ID NO: 1980 - RNA, 20 nt, synthetic construct
  source 1..20: mol_type = other RNA
ccagcatttccacaggacag

SEQ ID NO: 1981 - RNA, 20 nt, synthetic construct
  source 1..20: mol_type = other RNA
acttaccaaatacaaaaacc

SEQ ID NO: 1982 - RNA, 20 nt, synthetic construct
  source 1..20: mol_type = other RNA
gattctgatcagaaaggcat

SEQ ID NO: 1983 - RNA, 20 nt, synthetic construct
  source 1..20: mol_type = other RNA
tgaattctgaggaatacaga

SEQ ID NO: 1984 - RNA, 20 nt, synthetic construct
  source 1..20: mol_type = other RNA
atgacatacgtgatttctcc

SEQ ID NO: 1985 - RNA, 20 nt, synthetic construct
  source 1..20: mol_type = other RNA
tcctgctcctgcacaagaaa

SEQ ID NO: 1986 - RNA, 20 nt, synthetic construct
  source 1..20: mol_type = other RNA
tcaccctaggagcaaaacaa

SEQ ID NO: 1987 - RNA, 20 nt, synthetic construct
  source 1..20: mol_type = other RNA
cgcagcatcttcctgtgagg

SEQ ID NO: 1988 - RNA, 20 nt, synthetic construct
  source 1..20: mol_type = other RNA
gctcctgggggtagggggag

SEQ ID NO: 1989 - RNA, 20 nt, synthetic construct
  source 1..20: mol_type = other RNA
ggtgctcaccggccacctgc

SEQ ID NO: 1990 - RNA, 20 nt, synthetic construct
  source 1..20: mol_type = other RNA
agggagctggaggtgacaga

SEQ ID NO: 1991 - RNA, 20 nt, synthetic construct
  source 1..20: mol_type = other RNA
tagggagctggaggtgacag

SEQ ID NO: 1992 - RNA, 20 nt, synthetic construct
  source 1..20: mol_type = other RNA
gcaacctgtggggcttctct

SEQ ID NO: 1993 - RNA, 20 nt, synthetic construct
  source 1..20: mol_type = other RNA
agcaacctgtggggcttctc

SEQ ID NO: 1994 - RNA, 20 nt, synthetic construct
  source 1..20: mol_type = other RNA
ctcctgggggcggggtcaga

SEQ ID NO: 1995 - RNA, 20 nt, synthetic construct
  source 1..20: mol_type = other RNA
gctcctgggggcggggtcag

SEQ ID NO: 1996 - RNA, 20 nt, synthetic construct
  source 1..20: mol_type = other RNA
gcagggctgtaaaaaaagga

SEQ ID NO: 1997 - RNA, 20 nt, synthetic construct
  source 1..20: mol_type = other RNA
catcatcttcatttcatgat

SEQ ID NO: 1998 - RNA, 20 nt, synthetic construct
  source 1..20: mol_type = other RNA
ccatcatcttcatttcatga

SEQ ID NO: 1999 - RNA, 20 nt, synthetic construct
  source 1..20: mol_type = other RNA
gtccattgtcacagcctctg

SEQ ID NO: 2000 - RNA, 20 nt, synthetic construct
  source 1..20: mol_type = other RNA
cactcacccatctttcctct

SEQ ID NO: 2001 - RNA, 20 nt, synthetic construct
  source 1..20: mol_type = other RNA
acttactctgatgtaggaag

SEQ ID NO: 2002 - RNA, 20 nt, synthetic construct
  source 1..20: mol_type = other RNA
cttactctgatgtaggaagt

SEQ ID NO: 2003 - RNA, 20 nt, synthetic construct
  source 1..20: mol_type = other RNA
ttggaatacctgatagtctg

SEQ ID NO: 2004 - RNA, 20 nt, synthetic construct
  source 1..20: mol_type = other RNA
ggaacgctggaaaggagatg

SEQ ID NO: 2005 - RNA, 20 nt, synthetic construct
  source 1..20: mol_type = other RNA
gaacgctggaaaggagatga

SEQ ID NO: 2006 - RNA, 20 nt, synthetic construct
  source 1..20: mol_type = other RNA
acgtttgacatctttctccc

SEQ ID NO: 2007 - RNA, 20 nt, synthetic construct
  source 1..20: mol_type = other RNA
caaacgtgcgagtgtctaac

SEQ ID NO: 2008 - RNA, 20 nt, synthetic construct
  source 1..20: mol_type = other RNA
cgagtggcaagaggtggaga

SEQ ID NO: 2009 - RNA, 20 nt, synthetic construct
  source 1..20: mol_type = other RNA
gagtggcaagaggtggagaa

SEQ ID NO: 2010 - RNA, 20 nt, synthetic construct
  source 1..20: mol_type = other RNA
aggagagccaggatgtcagc

SEQ ID NO: 2011 - RNA, 20 nt, synthetic construct
  source 1..20: mol_type = other RNA
ggacagccagacggggttag

SEQ ID NO: 2012 - RNA, 20 nt, synthetic construct
  source 1..20: mol_type = other RNA
cggagcaatgcgcaggaata

SEQ ID NO: 2013 - RNA, 20 nt, synthetic construct
  source 1..20: mol_type = other RNA
aggaagcgacctgcaaccga

SEQ ID NO: 2014 - RNA, 20 nt, synthetic construct
  source 1..20: mol_type = other RNA
gagcagacgcccaagaagcc

SEQ ID NO: 2015 - RNA, 20 nt, synthetic construct
  source 1..20: mol_type = other RNA
gctgcagagcctgctgctct

SEQ ID NO: 2016 - RNA, 20 nt, synthetic construct
  source 1..20: mol_type = other RNA
gctcccagggctgcgtgctg

SEQ ID NO: 2017 - RNA, 20 nt, synthetic construct
  source 1..20: mol_type = other RNA
tgctcccagggctgcgtgct

SEQ ID NO: 2018 - RNA, 20 nt, synthetic construct
  source 1..20: mol_type = other RNA
atgctcccagggctgcgtgc

SEQ ID NO: 2019 - RNA, 20 nt, synthetic construct
  source 1..20: mol_type = other RNA
aggcactcaccggggttgga

SEQ ID NO: 2020 - RNA, 20 nt, synthetic construct
  source 1..20: mol_type = other RNA
ctggctcccagcagtcaaag

SEQ ID NO: 2021 - RNA, 20 nt, synthetic construct
  source 1..20: mol_type = other RNA
tgacatcttctcaggagctc

SEQ ID NO: 2022 - RNA, 20 nt, synthetic construct
  source 1..20: mol_type = other RNA
tcacggcatgaggctgagtt

SEQ ID NO: 2023 - RNA, 20 nt, synthetic construct
  source 1..20: mol_type = other RNA
gaaccaactggggagcagca

SEQ ID NO: 2024 - RNA, 20 nt, synthetic construct
  source 1..20: mol_type = other RNA
ggaaccaactggggagcagc

SEQ ID NO: 2025 - RNA, 20 nt, synthetic construct
  source 1..20: mol_type = other RNA
tcacctccaccagctgcatg

SEQ ID NO: 2026 - RNA, 20 nt, synthetic construct
  source 1..20: mol_type = other RNA
gtagtgctgcagggtgtggg

SEQ ID NO: 2027 - RNA, 20 nt, synthetic construct
  source 1..20: mol_type = other RNA
tgtagtgctgcagggtgtgg

SEQ ID NO: 2028 - RNA, 20 nt, synthetic construct
  source 1..20: mol_type = other RNA
cacgtctgggggcagagagg

SEQ ID NO: 2029 - RNA, 20 nt, synthetic construct
  source 1..20: mol_type = other RNA
catcacgtctgggggcagag

SEQ ID NO: 2030 - RNA, 20 nt, synthetic construct
  source 1..20: mol_type = other RNA
aggctcccctgggggcagga

SEQ ID NO: 2031 - RNA, 20 nt, synthetic construct
  source 1..20: mol_type = other RNA
tcactcacagcgagaacttg

SEQ ID NO: 2032 - RNA, 20 nt, synthetic construct
  source 1..20: mol_type = other RNA
cagccccaccttctctctca

SEQ ID NO: 2033 - RNA, 20 nt, synthetic construct
  source 1..20: mol_type = other RNA
gagaatttctgccatgtgga

SEQ ID NO: 2034 - RNA, 20 nt, synthetic construct
  source 1..20: mol_type = other RNA
atactcacaattcttggata

SEQ ID NO: 2035 - RNA, 20 nt, synthetic construct
  source 1..20: mol_type = other RNA
caggggctgtggccaggggg

SEQ ID NO: 2036 - RNA, 20 nt, synthetic construct
  source 1..20: mol_type = other RNA
actcacctttgcagaagaca

SEQ ID NO: 2037 - RNA, 20 nt, synthetic construct
  source 1..20: mol_type = other RNA
cactcacctttgcagaagac

SEQ ID NO: 2038 - RNA, 20 nt, synthetic construct
  source 1..20: mol_type = other RNA
agggccaggtcctggtagcc

SEQ ID NO: 2039 - RNA, 20 nt, synthetic construct
  source 1..20: mol_type = other RNA
ggcccagcctgctgtggtac

SEQ ID NO: 2040 - RNA, 20 nt, synthetic construct
  source 1..20: mol_type = other RNA
gcttcggcaggctgacagcc

SEQ ID NO: 2041 - RNA, 20 nt, synthetic construct
  source 1..20: mol_type = other RNA
tatccaaggactgagggcca

SEQ ID NO: 2042 - RNA, 20 nt, synthetic construct
  source 1..20: mol_type = other RNA
ggaacccagatttatgtaat

SEQ ID NO: 2043 - RNA, 20 nt, synthetic construct
  source 1..20: mol_type = other RNA
gctcaccaattacataaatc

SEQ ID NO: 2044 - RNA, 20 nt, synthetic construct
  source 1..20: mol_type = other RNA
ctcaccaattacataaatct

SEQ ID NO: 2045 - RNA, 20 nt, synthetic construct
  source 1..20: mol_type = other RNA
ctcagctgaacctggctacc

SEQ ID NO: 2046 - RNA, 20 nt, synthetic construct
  source 1..20: mol_type = other RNA
ttaacatctactacatacaa

SEQ ID NO: 2047 - RNA, 20 nt, synthetic construct
  source 1..20: mol_type = other RNA
cttacctggatatagtcaac

SEQ ID NO: 2048 - RNA, 20 nt, synthetic construct
  source 1..20: mol_type = other RNA
atccagcgtaagaataacag

SEQ ID NO: 2049 - RNA, 20 nt, synthetic construct
  source 1..20: mol_type = other RNA
gtatgtacaacaaaataatg

SEQ ID NO: 2050 - RNA, 20 nt, synthetic construct
  source 1..20: mol_type = other RNA
cgagatcaagttgtacgtta

SEQ ID NO: 2051 - RNA, 20 nt, synthetic construct
  source 1..20: mol_type = other RNA
tgccagatgttaatgatttt

SEQ ID NO: 2052 - RNA, 20 nt, synthetic construct
  source 1..20: mol_type = other RNA
atgtcagttcacgtcaaaac

SEQ ID NO: 2053 - RNA, 20 nt, synthetic construct
  source 1..20: mol_type = other RNA
gccctacagtccctcgcctg

SEQ ID NO: 2054 - RNA, 20 nt, synthetic construct
  source 1..20: mol_type = other RNA
gtccagaatttccagaagta

SEQ ID NO: 2055 - RNA, 20 nt, synthetic construct
  source 1..20: mol_type = other RNA
tccctggaggggtgggggag

SEQ ID NO: 2056 - RNA, 20 nt, synthetic construct
  source 1..20: mol_type = other RNA
tcacttcaacaggactccta

SEQ ID NO: 2057 - RNA, 20 nt, synthetic construct
  source 1..20: mol_type = other RNA
ccttacactcaaaggcaaag

SEQ ID NO: 2058 - RNA, 20 nt, synthetic construct
  source 1..20: mol_type = other RNA
atggctgcagggagaggaag

SEQ ID NO: 2059 - RNA, 20 nt, synthetic construct
  source 1..20: mol_type = other RNA
ggagcgccaggggatgctgg

SEQ ID NO: 2060 - RNA, 20 nt, synthetic construct
  source 1..20: mol_type = other RNA
tcacgtcccatgcagccaca

SEQ ID NO: 2061 - RNA, 20 nt, synthetic construct
  source 1..20: mol_type = other RNA
tggacgtctggtggggagta

SEQ ID NO: 2062 - RNA, 20 nt, synthetic construct
  source 1..20: mol_type = other RNA
actcacattgatgaggaaga

SEQ ID NO: 2063 - RNA, 20 nt, synthetic construct
  source 1..20: mol_type = other RNA
cagcatctgagaaaggcaga

SEQ ID NO: 2064 - RNA, 20 nt, synthetic construct
  source 1..20: mol_type = other RNA
aatccaacacctcagcgatg

SEQ ID NO: 2065 - RNA, 20 nt, synthetic construct
  source 1..20: mol_type = other RNA
atccaacacctcagcgatgt

SEQ ID NO: 2066 - RNA, 20 nt, synthetic construct
  source 1..20: mol_type = other RNA
gtggccattccttagtcttg

SEQ ID NO: 2067 - RNA, 20 nt, synthetic construct
  source 1..20: mol_type = other RNA
cttaccgatgttcccttcga

SEQ ID NO: 2068 - RNA, 20 nt, synthetic construct
  source 1..20: mol_type = other RNA
ttaaacaattgtgtgaagat

SEQ ID NO: 2069 - RNA, 20 nt, synthetic construct
  source 1..20: mol_type = other RNA
taaacaattgtgtgaagatt

SEQ ID NO: 2070 - RNA, 20 nt, synthetic construct
  source 1..20: mol_type = other RNA
caccatctggcaacaggttc

SEQ ID NO: 2071 - RNA, 20 nt, synthetic construct
  source 1..20: mol_type = other RNA
aagtactcaagatgaatttg

SEQ ID NO: 2072 - RNA, 20 nt, synthetic construct
  source 1..20: mol_type = other RNA
caatgtctcagaaaaatggt

SEQ ID NO: 2073 - RNA, 20 nt, synthetic construct
  source 1..20: mol_type = other RNA
gctcagcttgcctctctgaa

SEQ ID NO: 2074 - RNA, 20 nt, synthetic construct
  source 1..20: mol_type = other RNA
tttatcaagactggcatgac

SEQ ID NO: 2075 - RNA, 20 nt, synthetic construct
  source 1..20: mol_type = other RNA
atttggccaaagccttgaat

SEQ ID NO: 2076 - RNA, 20 nt, synthetic construct
  source 1..20: mol_type = other RNA
ttatcttcaagccactccag

SEQ ID NO: 2077 - RNA, 20 nt, synthetic construct
  source 1..20: mol_type = other RNA
cttacttcagtgtcctatgc

SEQ ID NO: 2078 - RNA, 20 nt, synthetic construct
  source 1..20: mol_type = other RNA
accccattttgttccgcctc

SEQ ID NO: 2079 - RNA, 20 nt, synthetic construct
  source 1..20: mol_type = other RNA
tcacattctaacttgtcttc

SEQ ID NO: 2080 - RNA, 20 nt, synthetic construct
  source 1..20: mol_type = other RNA
tgactgtggggtgttttagg

SEQ ID NO: 2081 - RNA, 20 nt, synthetic construct
  source 1..20: mol_type = other RNA
gtgactgtggggtgttttag

SEQ ID NO: 2082 - RNA, 20 nt, synthetic construct
  source 1..20: mol_type = other RNA
ggtgactgtggggtgtttta

SEQ ID NO: 2083 - RNA, 20 nt, synthetic construct
  source 1..20: mol_type = other RNA
aggtgactgtggggtgtttt

SEQ ID NO: 2084 - RNA, 20 nt, synthetic construct
  source 1..20: mol_type = other RNA
aatctgagcacagagtggaa

SEQ ID NO: 2085 - RNA, 20 nt, synthetic construct
  source 1..20: mol_type = other RNA
tgaagaatctgagcacagag

SEQ ID NO: 2086 - RNA, 20 nt, synthetic construct
  source 1..20: mol_type = other RNA
tgattggaccttggggagaa

SEQ ID NO: 2087 - RNA, 20 nt, synthetic construct
  source 1..20: mol_type = other RNA
gtggatctgaaagacgaggt

SEQ ID NO: 2088 - RNA, 20 nt, synthetic construct
  source 1..20: mol_type = other RNA
cgtggatctgaaagacgagg

SEQ ID NO: 2089 - RNA, 20 nt, synthetic construct
  source 1..20: mol_type = other RNA
ctgtacccgcagagcctcag

SEQ ID NO: 2090 - RNA, 20 nt, synthetic construct
  source 1..20: mol_type = other RNA
aatcggagcctgagacaaag

SEQ ID NO: 2091 - RNA, 20 nt, synthetic construct
  source 1..20: mol_type = other RNA
acttacctcctccccatctt

SEQ ID NO: 2092 - RNA, 20 nt, synthetic construct
  source 1..20: mol_type = other RNA
aacctaggagtggagaagac

SEQ ID NO: 2093 - RNA, 20 nt, synthetic construct
  source 1..20: mol_type = other RNA
agaggcatcctggagagttc

SEQ ID NO: 2094 - RNA, 20 nt, synthetic construct
  source 1..20: mol_type = other RNA
cccacagatctgagaggagg

SEQ ID NO: 2095 - RNA, 20 nt, synthetic construct
  source 1..20: mol_type = other RNA
ttaggtctggggacgaagta

SEQ ID NO: 2096 - RNA, 20 nt, synthetic construct
  source 1..20: mol_type = other RNA
cttaggtctggggacgaagt

SEQ ID NO: 2097 - RNA, 20 nt, synthetic construct
  source 1..20: mol_type = other RNA
tgtggtgctataggaggcca

SEQ ID NO: 2098 - RNA, 20 nt, synthetic construct
  source 1..20: mol_type = other RNA
gaccctggaagagttggggc

SEQ ID NO: 2099 - RNA, 20 nt, synthetic construct
  source 1..20: mol_type = other RNA
ctgactcctagccacgggat

SEQ ID NO: 2100 - RNA, 20 nt, synthetic construct
  source 1..20: mol_type = other RNA
ctgctgcaggacaggaagag

SEQ ID NO: 2101 - RNA, 20 nt, synthetic construct
  source 1..20: mol_type = other RNA
acttacctcgcggacattcc

SEQ ID NO: 2102 - RNA, 20 nt, synthetic construct
  source 1..20: mol_type = other RNA
aaggttggctgggggagaag

SEQ ID NO: 2103 - RNA, 20 nt, synthetic construct
  source 1..20: mol_type = other RNA
aaaggttggctgggggagaa

SEQ ID NO: 2104 - RNA, 20 nt, synthetic construct
  source 1..20: mol_type = other RNA
atccctgagggtagacagga

SEQ ID NO: 2105 - RNA, 20 nt, synthetic construct
  source 1..20: mol_type = other RNA
tggaatccctgagggtagac

SEQ ID NO: 2106 - RNA, 20 nt, synthetic construct
  source 1..20: mol_type = other RNA
gtggtactgaggagagcgag

SEQ ID NO: 2107 - RNA, 20 nt, synthetic construct
  source 1..20: mol_type = other RNA
tgtggtactgaggagagcga

SEQ ID NO: 2108 - RNA, 20 nt, synthetic construct
  source 1..20: mol_type = other RNA
ctgtggtactgaggagagcg

SEQ ID NO: 2109 - RNA, 20 nt, synthetic construct
  source 1..20: mol_type = other RNA
agtactcacctggggcctcc

SEQ ID NO: 2110 - RNA, 20 nt, synthetic construct
  source 1..20: mol_type = other RNA
gtattctgcaagggaagcag

SEQ ID NO: 2111 - RNA, 20 nt, synthetic construct
  source 1..20: mol_type = other RNA
agtattctgcaagggaagca

SEQ ID NO: 2112 - RNA, 20 nt, synthetic construct
  source 1..20: mol_type = other RNA
gagtattctgcaagggaagc

SEQ ID NO: 2113 - RNA, 20 nt, synthetic construct
  source 1..20: mol_type = other RNA
ctcctgggagacaaggtgag

SEQ ID NO: 2114 - RNA, 20 nt, synthetic construct
  source 1..20: mol_type = other RNA
tttgcaccctggatgggatg

SEQ ID NO: 2115 - RNA, 20 nt, synthetic construct
  source 1..20: mol_type = other RNA
agcctgggctcatgggaaga

SEQ ID NO: 2116 - RNA, 20 nt, synthetic construct
  source 1..20: mol_type = other RNA
gcttaccccaccccagttga

SEQ ID NO: 2117 - RNA, 20 nt, synthetic construct
  source 1..20: mol_type = other RNA
tgcttaccccaccccagttg

SEQ ID NO: 2118 - RNA, 20 nt, synthetic construct
  source 1..20: mol_type = other RNA
tagccctgggggagcaggca

SEQ ID NO: 2119 - RNA, 20 nt, synthetic construct
  source 1..20: mol_type = other RNA
gtagccctgggggagcaggc

SEQ ID NO: 2120 - RNA, 20 nt, synthetic construct
  source 1..20: mol_type = other RNA
ggcaactggaaaaaggtcaa

SEQ ID NO: 2121 - RNA, 20 nt, synthetic construct
  source 1..20: mol_type = other RNA
gggcaactggaaaaaggtca

SEQ ID NO: 2122 - RNA, 20 nt, synthetic construct
  source 1..20: mol_type = other RNA
gctgccaacctcgagactcg

SEQ ID NO: 2123 - RNA, 20 nt, synthetic construct
  source 1..20: mol_type = other RNA
agctgtctgtgggagacaga

SEQ ID NO: 2124 - RNA, 20 nt, synthetic construct
  source 1..20: mol_type = other RNA
aagctgtctgtgggagacag

SEQ ID NO: 2125 - RNA, 20 nt, synthetic construct
  source 1..20: mol_type = other RNA
ctcctcacctggggatgttc

SEQ ID NO: 2126 - RNA, 20 nt, synthetic construct
  source 1..20: mol_type = other RNA
cccactcaccaacgacgtca

SEQ ID NO: 2127 - RNA, 20 nt, synthetic construct
  source 1..20: mol_type = other RNA
gtactcgctgtgcagggggg

SEQ ID NO: 2128 - RNA, 20 nt, synthetic construct
  source 1..20: mol_type = other RNA
gacgtactcgctgtgcaggg

SEQ ID NO: 2129 - RNA, 20 nt, synthetic construct
  source 1..20: mol_type = other RNA
ggacgtactcgctgtgcagg

SEQ ID NO: 2130 - RNA, 20 nt, synthetic construct
  source 1..20: mol_type = other RNA
gggacgtactcgctgtgcag

SEQ ID NO: 2131 - RNA, 20 nt, synthetic construct
  source 1..20: mol_type = other RNA
tgctggctgtcgggcagggc

SEQ ID NO: 2132 - RNA, 20 nt, synthetic construct
  source 1..20: mol_type = other RNA
gctcctgttgagagaagcaa

SEQ ID NO: 2133 - RNA, 20 nt, synthetic construct
  source 1..20: mol_type = other RNA
agtggtggctgtgggagaga

SEQ ID NO: 2134 - RNA, 20 nt, synthetic construct
  source 1..20: mol_type = other RNA
gctcctgtggggggaggtca

SEQ ID NO: 2135 - RNA, 20 nt, synthetic construct
  source 1..20: mol_type = other RNA
tgctcctgtggggggaggtc

SEQ ID NO: 2136 - RNA, 20 nt, synthetic construct
  source 1..20: mol_type = other RNA
tcaccggggcgtgggtgagc

SEQ ID NO: 2137 - RNA, 20 nt, synthetic construct
  source 1..20: mol_type = other RNA
ggagctgagggcaggaggca

SEQ ID NO: 2138 - RNA, 20 nt, synthetic construct
  source 1..20: mol_type = other RNA
ccggctcaccgtggtccagc

SEQ ID NO: 2139 - RNA, 20 nt, synthetic construct
  source 1..20: mol_type = other RNA
gggggctggagaaggggagg

SEQ ID NO: 2140 - RNA, 20 nt, synthetic construct
  source 1..20: mol_type = other RNA
tgggggggctggagaagggg

SEQ ID NO: 2141 - RNA, 20 nt, synthetic construct
  source 1..20: mol_type = other RNA
cccgctgggggagcaggggc

SEQ ID NO: 2142 - RNA, 20 nt, synthetic construct
  source 1..20: mol_type = other RNA
tctccccgctgggggagcag

SEQ ID NO: 2143 - RNA, 20 nt, synthetic construct
  source 1..20: mol_type = other RNA
acactggaggcgggcgggga

SEQ ID NO: 2144 - RNA, 20 nt, synthetic construct
  source 1..20: mol_type = other RNA
cacactggaggcgggcgggg

SEQ ID NO: 2145 - RNA, 20 nt, synthetic construct
  source 1..20: mol_type = other RNA
catcacactggaggcgggcg

SEQ ID NO: 2146 - RNA, 20 nt, synthetic construct
  source 1..20: mol_type = other RNA
ctacgcgagcagggcgctcc

SEQ ID NO: 2147 - RNA, 20 nt, synthetic construct
  source 1..20: mol_type = other RNA
tggctgttgggcacagagac

SEQ ID NO: 2148 - RNA, 20 nt, synthetic construct
  source 1..20: mol_type = other RNA
actgacttctgctgcaggac

SEQ ID NO: 2149 - RNA, 20 nt, synthetic construct
  source 1..20: mol_type = other RNA
tccccatggcgactaggcca

SEQ ID NO: 2150 - RNA, 20 nt, synthetic construct
  source 1..20: mol_type = other RNA
ttccccatggcgactaggcc

SEQ ID NO: 2151 - RNA, 20 nt, synthetic construct
  source 1..20: mol_type = other RNA
gaacctgcatttccggggag

SEQ ID NO: 2152 - RNA, 20 nt, synthetic construct
  source 1..20: mol_type = other RNA
gtggcgaacctgcatttccg

SEQ ID NO: 2153 - RNA, 20 nt, synthetic construct
  source 1..20: mol_type = other RNA
tcactgggggaggaagaaca

SEQ ID NO: 2154 - RNA, 20 nt, synthetic construct
  source 1..20: mol_type = other RNA
accctgtatgggcagagttc

SEQ ID NO: 2155 - RNA, 20 nt, synthetic construct
  source 1..20: mol_type = other RNA
gaccctgtatgggcagagtt

SEQ ID NO: 2156 - RNA, 20 nt, synthetic construct
  source 1..20: mol_type = other RNA
aagtcctggggggaggtccg

SEQ ID NO: 2157 - RNA, 20 nt, synthetic construct
  source 1..20: mol_type = other RNA
gaagtcctggggggaggtcc

SEQ ID NO: 2158 - RNA, 20 nt, synthetic construct
  source 1..20: mol_type = other RNA
ggaagtcctggggggaggtc

SEQ ID NO: 2159 - RNA, 20 nt, synthetic construct
  source 1..20: mol_type = other RNA
aggttcctctgcaaaaggac

SEQ ID NO: 2160 - RNA, 20 nt, synthetic construct
  source 1..20: mol_type = other RNA
gttaccttgatgaccggcgg

SEQ ID NO: 2161 - RNA, 20 nt, synthetic construct
  source 1..20: mol_type = other RNA
tgtgttaccttgatgaccgg

SEQ ID NO: 2162 - RNA, 20 nt, synthetic construct
  source 1..20: mol_type = other RNA
cacctgtgggacgcccagga

SEQ ID NO: 2163 - RNA, 20 nt, synthetic construct
  source 1..20: mol_type = other RNA
attccacctgtgggacgccc

SEQ ID NO: 2164 - RNA, 20 nt, synthetic construct
  source 1..20: mol_type = other RNA
cctcacctgcgggcagcatc

SEQ ID NO: 2165 - RNA, 20 nt, synthetic construct
  source 1..20: mol_type = other RNA
atgccacctgtggaaagaat

SEQ ID NO: 2166 - RNA, 20 nt, synthetic construct
  source 1..20: mol_type = other RNA
gatgccacctgtggaaagaa

SEQ ID NO: 2167 - RNA, 20 nt, synthetic construct
  source 1..20: mol_type = other RNA
tttaccttgtggccgggctc

SEQ ID NO: 2168 - RNA, 20 nt, synthetic construct
  source 1..20: mol_type = other RNA
tttctgggagaggggcaggt

SEQ ID NO: 2169 - RNA, 20 nt, synthetic construct
  source 1..20: mol_type = other RNA
tccttttctgggagaggggc

SEQ ID NO: 2170 - RNA, 20 nt, synthetic construct
  source 1..20: mol_type = other RNA
ctcacctggagggaaagcag

SEQ ID NO: 2171 - RNA, 20 nt, synthetic construct
  source 1..20: mol_type = other RNA
ttacctgtgcttgcttctct

SEQ ID NO: 2172 - RNA, 20 nt, synthetic construct
  source 1..20: mol_type = other RNA
gttacctgtgcttgcttctc

SEQ ID NO: 2173 - RNA, 20 nt, synthetic construct
  source 1..20: mol_type = other RNA
aagacctaggattcggggaa

SEQ ID NO: 2174 - RNA, 20 nt, synthetic construct
  source 1..20: mol_type = other RNA
aaagacctaggattcgggga

SEQ ID NO: 2175 - RNA, 20 nt, synthetic construct
  source 1..20: mol_type = other RNA
acccacctgtagcagtggcc

SEQ ID NO: 2176 - RNA, 20 nt, synthetic construct
  source 1..20: mol_type = other RNA
gacccacctgtagcagtggc

SEQ ID NO: 2177 - RNA, 20 nt, synthetic construct
  source 1..20: mol_type = other RNA
agcctggatggagagaaacc

SEQ ID NO: 2178 - RNA, 20 nt, synthetic construct
  source 1..20: mol_type = other RNA
cagcctggatggagagaaac

SEQ ID NO: 2179 - RNA, 20 nt, synthetic construct
  source 1..20: mol_type = other RNA
ccttacctttctgctttctg

SEQ ID NO: 2180 - RNA, 20 nt, synthetic construct
  source 1..20: mol_type = other RNA
gccttacctttctgctttct

SEQ ID NO: 2181 - RNA, 20 nt, synthetic construct
  source 1..20: mol_type = other RNA
ggccttacctttctgctttc

SEQ ID NO: 2182 - RNA, 20 nt, synthetic construct
  source 1..20: mol_type = other RNA
caccctggagatggaggtgg

SEQ ID NO: 2183 - RNA, 20 nt, synthetic construct
  source 1..20: mol_type = other RNA
cttcaccctggagatggagg

SEQ ID NO: 2184 - RNA, 20 nt, synthetic construct
  source 1..20: mol_type = other RNA
acaaacccagcagcaccatg

SEQ ID NO: 2185 - RNA, 20 nt, synthetic construct
  source 1..20: mol_type = other RNA
gcgcctggggaacgaagagg

SEQ ID NO: 2186 - RNA, 20 nt, synthetic construct
  source 1..20: mol_type = other RNA
ggcgcctggggaacgaagag

SEQ ID NO: 2187 - RNA, 20 nt, synthetic construct
  source 1..20: mol_type = other RNA
cggcgcctggggaacgaaga

SEQ ID NO: 2188 - RNA, 20 nt, synthetic construct
  source 1..20: mol_type = other RNA
acggcgcctggggaacgaag

SEQ ID NO: 2189 - RNA, 20 nt, synthetic construct
  source 1..20: mol_type = other RNA
ccgtacctgcggtggtcagc

SEQ ID NO: 2190 - RNA, 20 nt, synthetic construct
  source 1..20: mol_type = other RNA
agacgcctgggggccggggg

SEQ ID NO: 2191 - RNA, 20 nt, synthetic construct
  source 1..20: mol_type = other RNA
actcacagaacacgctggcc

SEQ ID NO: 2192 - RNA, 20 nt, synthetic construct
  source 1..20: mol_type = other RNA
cacctacctgcccttccagc

SEQ ID NO: 2193 - RNA, 20 nt, synthetic construct
  source 1..20: mol_type = other RNA
aagacctgatgagagaccac

SEQ ID NO: 2194 - RNA, 20 nt, synthetic construct
  source 1..20: mol_type = other RNA
gcaggtctgcaggggaggga

SEQ ID NO: 2195 - RNA, 20 nt, synthetic construct
  source 1..20: mol_type = other RNA
acgtcctgggggcggcgggc

SEQ ID NO: 2196 - RNA, 20 nt, synthetic construct
  source 1..20: mol_type = other RNA
gtcatcctgaggagagaagc

SEQ ID NO: 2197 - RNA, 20 nt, synthetic construct
  source 1..20: mol_type = other RNA
tcactgcacggcttgttcat

SEQ ID NO: 2198 - RNA, 20 nt, synthetic construct
  source 1..20: mol_type = other RNA
atgcaggctatgggggtggg

SEQ ID NO: 2199 - RNA, 20 nt, synthetic construct
  source 1..20: mol_type = other RNA
catgcaggctatgggggtgg

SEQ ID NO: 2200 - RNA, 20 nt, synthetic construct
  source 1..20: mol_type = other RNA
gtctttttcattgactagaa

SEQ ID NO: 2201 - RNA, 20 nt, synthetic construct
  source 1..20: mol_type = other RNA
tgacttaccttaacgttttc

SEQ ID NO: 2202 - RNA, 20 nt, synthetic construct
  source 1..20: mol_type = other RNA
tgcatcaagtagaagaatgc

SEQ ID NO: 2203 - RNA, 20 nt, synthetic construct
  source 1..20: mol_type = other RNA
ctctttccatgcaatcagtc

SEQ ID NO: 2204 - RNA, 20 nt, synthetic construct
  source 1..20: mol_type = other RNA
gttcagaaagtaaatgaaat

SEQ ID NO: 2205 - RNA, 20 nt, synthetic construct
  source 1..20: mol_type = other RNA
tcactttccatcctgtacaa

SEQ ID NO: 2206 - RNA, 20 nt, synthetic construct
  source 1..20: mol_type = other RNA
ggccaagaggaaggtgccta

SEQ ID NO: 2207 - RNA, 20 nt, synthetic construct
  source 1..20: mol_type = other RNA
gctctgcaatttcgcctcta

SEQ ID NO: 2208 - RNA, 20 nt, synthetic construct
  source 1..20: mol_type = other RNA
actctggcagaaactggcca

SEQ ID NO: 2209 - RNA, 20 nt, synthetic construct
  source 1..20: mol_type = other RNA
tatacttgcctgaatgtcct

SEQ ID NO: 2210 - RNA, 20 nt, synthetic construct
  source 1..20: mol_type = other RNA
aacttaccccaaaatccccc

SEQ ID NO: 2211 - RNA, 20 nt, synthetic construct
  source 1..20: mol_type = other RNA
ctgtgctcagccttgggagg

SEQ ID NO: 2212 - RNA, 20 nt, synthetic construct
  source 1..20: mol_type = other RNA
ttttatctagaagtgaagtg

SEQ ID NO: 2213 - RNA, 20 nt, synthetic construct
  source 1..20: mol_type = other RNA
tttatctagaagtgaagtga

SEQ ID NO: 2214 - RNA, 20 nt, synthetic construct
  source 1..20: mol_type = other RNA
ttatctagaagtgaagtgag

SEQ ID NO: 2215 - RNA, 20 nt, synthetic construct
  source 1..20: mol_type = other RNA
tatctagaagtgaagtgagg

SEQ ID NO: 2216 - RNA, 20 nt, synthetic construct
  source 1..20: mol_type = other RNA
aaattaccttgccaatgaaa

SEQ ID NO: 2217 - RNA, 20 nt, synthetic construct
  source 1..20: mol_type = other RNA
cccaccttcttccccaggcg

SEQ ID NO: 2218 - RNA, 20 nt, synthetic construct
  source 1..20: mol_type = other RNA
gagcagaacgacctggagcc

SEQ ID NO: 2219 - RNA, 20 nt, synthetic construct
  source 1..20: mol_type = other RNA
gtcctgccagatgaacctgg

SEQ ID NO: 2220 - RNA, 20 nt, synthetic construct
  source 1..20: mol_type = other RNA
cctggtacaagaggttcagc

SEQ ID NO: 2221 - RNA, 20 nt, synthetic construct
  source 1..20: mol_type = other RNA
gtgacctccagaacaggagt

SEQ ID NO: 2222 - RNA, 20 nt, synthetic construct
  source 1..20: mol_type = other RNA
tgacctccagaacaggagtg

SEQ ID NO: 2223 - RNA, 20 nt, synthetic construct
  source 1..20: mol_type = other RNA
gttccatgacatcggggaca

SEQ ID NO: 2224 - RNA, 20 nt, synthetic construct
  source 1..20: mol_type = other RNA
ggagttcatagctgggctcc

SEQ ID NO: 2225 - RNA, 20 nt, synthetic construct
  source 1..20: mol_type = other RNA
cctacccacctcctttctca

SEQ ID NO: 2226 - RNA, 20 nt, synthetic construct
  source 1..20: mol_type = other RNA
gtacctcattgaatccagat

SEQ ID NO: 2227 - RNA, 20 nt, synthetic construct
  source 1..20: mol_type = other RNA
cttccaatctggattcaatg

SEQ ID NO: 2228 - RNA, 20 nt, synthetic construct
  source 1..20: mol_type = other RNA
ctcctaagaggaaagatggt

SEQ ID NO: 2229 - RNA, 20 nt, synthetic construct
  source 1..20: mol_type = other RNA
tctcctaagaggaaagatgg

SEQ ID NO: 2230 - RNA, 20 nt, synthetic construct
  source 1..20: mol_type = other RNA
aagtctcctaagaggaaaga

SEQ ID NO: 2231 - RNA, 20 nt, synthetic construct
  source 1..20: mol_type = other RNA
ccacctttttctgcaggaac

SEQ ID NO: 2232 - RNA, 20 nt, synthetic construct
  source 1..20: mol_type = other RNA
agctgcaggcacagaaccag

SEQ ID NO: 2233 - RNA, 20 nt, synthetic construct
  source 1..20: mol_type = other RNA
ggcacagaaccagtggctgc

SEQ ID NO: 2234 - RNA, 20 nt, synthetic construct
  source 1..20: mol_type = other RNA
gttcctgcagtccagcctga

SEQ ID NO: 2235 - RNA, 20 nt, synthetic construct
  source 1..20: mol_type = other RNA
tgggggtactggggcaggga

SEQ ID NO: 2236 - RNA, 20 nt, synthetic construct
  source 1..20: mol_type = other RNA
attccctcaacttggtgtgg

SEQ ID NO: 2237 - RNA, 20 nt, synthetic construct
  source 1..20: mol_type = other RNA
cggccagcatgcttcctcct

SEQ ID NO: 2238 - RNA, 20 nt, synthetic construct
  source 1..20: mol_type = other RNA
tgactgttagacacaaaaca

SEQ ID NO: 2239 - RNA, 20 nt, synthetic construct
  source 1..20: mol_type = other RNA
ctcctgccagttagcagtcc

SEQ ID NO: 2240 - RNA, 20 nt, synthetic construct
  source 1..20: mol_type = other RNA
actcaaacctttcagggttg

SEQ ID NO: 2241 - RNA, 20 nt, synthetic construct
  source 1..20: mol_type = other RNA
cctggcaagacccccactcc

SEQ ID NO: 2242 - RNA, 20 nt, synthetic construct
  source 1..20: mol_type = other RNA
ttgacctgagggcgggggca

SEQ ID NO: 2243 - RNA, 20 nt, synthetic construct
  source 1..20: mol_type = other RNA
cgtggtgcagcttcgtgccc

SEQ ID NO: 2244 - RNA, 20 nt, synthetic construct
  source 1..20: mol_type = other RNA
acctgtccaaggcgtgccca

SEQ ID NO: 2245 - RNA, 20 nt, synthetic construct
  source 1..20: mol_type = other RNA
ctgggtcccaaatgccaccc

SEQ ID NO: 2246 - RNA, 20 nt, synthetic construct
  source 1..20: mol_type = other RNA
ggattctgcggacagaagaa

SEQ ID NO: 2247 - RNA, 20 nt, synthetic construct
  source 1..20: mol_type = other RNA
ggagctcacctgcatggggg

SEQ ID NO: 2248 - RNA, 20 nt, synthetic construct
  source 1..20: mol_type = other RNA
tttgctgcaggaagaacaaa

SEQ ID NO: 2249 - RNA, 20 nt, synthetic construct
  source 1..20: mol_type = other RNA
gcagcaaatgaaggatcagc

SEQ ID NO: 2250 - RNA, 20 nt, synthetic construct
  source 1..20: mol_type = other RNA
accctaagggcaggagccaa

SEQ ID NO: 2251 - RNA, 20 nt, synthetic construct
  source 1..20: mol_type = other RNA
gatgatccagttttacctgg

SEQ ID NO: 2252 - RNA, 20 nt, synthetic construct
  source 1..20: mol_type = other RNA
gaaccaagacccagacatca

SEQ ID NO: 2253 - RNA, 20 nt, synthetic construct
  source 1..20: mol_type = other RNA
ccaggcagtgtgagtcagct

SEQ ID NO: 2254 - RNA, 20 nt, synthetic construct
  source 1..20: mol_type = other RNA
tggccctccagctgtatgtg

SEQ ID NO: 2255 - RNA, 20 nt, synthetic construct
  source 1..20: mol_type = other RNA
cttcaaaccacacagacgga

SEQ ID NO: 2256 - RNA, 20 nt, synthetic construct
  source 1..20: mol_type = other RNA
tgggtgtccagtggaggatg

SEQ ID NO: 2257 - RNA, 20 nt, synthetic construct
  source 1..20: mol_type = other RNA
gcttcaaaccacacagacgg

SEQ ID NO: 2258 - RNA, 20 nt, synthetic construct
  source 1..20: mol_type = other RNA
tccatacctgaggagatacc

SEQ ID NO: 2259 - RNA, 20 nt, synthetic construct
  source 1..20: mol_type = other RNA
tgacggtccagttggagtgc

SEQ ID NO: 2260 - RNA, 20 nt, synthetic construct
  source 1..20: mol_type = other RNA
ccccataccgtgaagtttcc

SEQ ID NO: 2261 - RNA, 20 nt, synthetic construct
  source 1..20: mol_type = other RNA
tgactcacactgcctggtga

SEQ ID NO: 2262 - RNA, 20 nt, synthetic construct
  source 1..20: mol_type = other RNA
ctgactcacactgcctggtg

SEQ ID NO: 2263 - RNA, 20 nt, synthetic construct
  source 1..20: mol_type = other RNA
accaggcagtgtgagtcagc

SEQ ID NO: 2264 - RNA, 20 nt, synthetic construct
  source 1..20: mol_type = other RNA
ttgaagagctggggaagaga

SEQ ID NO: 2265 - RNA, 20 nt, synthetic construct
  source 1..20: mol_type = other RNA
agctccagtcagatattccc

SEQ ID NO: 2266 - RNA, 20 nt, synthetic construct
  source 1..20: mol_type = other RNA
agttcaaaactctgagggcc

SEQ ID NO: 2267 - RNA, 20 nt, synthetic construct
  source 1..20: mol_type = other RNA
tagttcaaaactctgagggc

SEQ ID NO: 2268 - RNA, 20 nt, synthetic construct
  source 1..20: mol_type = other RNA
ctggttccactgtcccgttg

SEQ ID NO: 2269 - RNA, 20 nt, synthetic construct
  source 1..20: mol_type = other RNA
gctggttccactgtcccgtt

SEQ ID NO: 2270 - RNA, 20 nt, synthetic construct
  source 1..20: mol_type = other RNA
tggcattccagggttacctg

SEQ ID NO: 2271 - RNA, 20 nt, synthetic construct
  source 1..20: mol_type = other RNA
ggctggttccactgtcccgt

SEQ ID NO: 2272 - RNA, 20 nt, synthetic construct
  source 1..20: mol_type = other RNA
gccggagaccttgaagagcg

SEQ ID NO: 2273 - RNA, 20 nt, synthetic construct
  source 1..20: mol_type = other RNA
ggcggccgaggcggagagtt

SEQ ID NO: 2274 - RNA, 20 nt, synthetic construct
  source 1..20: mol_type = other RNA
cgttctcccacaccagcccg

SEQ ID NO: 2275 - RNA, 20 nt, synthetic construct
  source 1..20: mol_type = other RNA
cgcggttgtagtcctgcttg

SEQ ID NO: 2276 - RNA, 20 nt, synthetic construct
  source 1..20: mol_type = other RNA
ctaccttttttggctccctc

SEQ ID NO: 2277 - RNA, 20 nt, synthetic construct
  source 1..20: mol_type = other RNA
gtcttccaggtgggagggtc

SEQ ID NO: 2278 - RNA, 20 nt, synthetic construct
  source 1..20: mol_type = other RNA
ctcctacatgtttggggaaa

SEQ ID NO: 2279 - RNA, 20 nt, synthetic construct
  source 1..20: mol_type = other RNA
atacctgggctgggagcgaa

SEQ ID NO: 2280 - RNA, 20 nt, synthetic construct
  source 1..20: mol_type = other RNA
catacctgggctgggagcga

SEQ ID NO: 2281 - RNA, 20 nt, synthetic construct
  source 1..20: mol_type = other RNA
agccaagcagctcaccctgg

SEQ ID NO: 2282 - RNA, 20 nt, synthetic construct
  source 1..20: mol_type = other RNA
cccagcccaggtatggtgga

SEQ ID NO: 2283 - RNA, 20 nt, synthetic construct
  source 1..20: mol_type = other RNA
ctgctaaaggagtgcaggag

SEQ ID NO: 2284 - RNA, 20 nt, synthetic construct
  source 1..20: mol_type = other RNA
tccttaccattttcacaagc

SEQ ID NO: 2285 - RNA, 20 nt, synthetic construct
  source 1..20: mol_type = other RNA
ccttaccattttcacaagct

SEQ ID NO: 2286 - RNA, 20 nt, synthetic construct
  source 1..20: mol_type = other RNA
agtccctccagcttcggtcg

SEQ ID NO: 2287 - RNA, 20 nt, synthetic construct
  source 1..20: mol_type = other RNA
gtccctccagcttcggtcga

SEQ ID NO: 2288 - RNA, 20 nt, synthetic construct
  source 1..20: mol_type = other RNA
tccctccagcttcggtcgag

SEQ ID NO: 2289 - RNA, 20 nt, synthetic construct
  source 1..20: mol_type = other RNA
taccaatgtcccatgacgtt

SEQ ID NO: 2290 - RNA, 20 nt, synthetic construct
  source 1..20: mol_type = other RNA
gccttgccagtggtggccgc

SEQ ID NO: 2291 - RNA, 20 nt, synthetic construct
  source 1..20: mol_type = other RNA
ccttgccagtggtggccgcg

SEQ ID NO: 2292 - RNA, 20 nt, synthetic construct
  source 1..20: mol_type = other RNA
gcactcacctgagaacgcca

SEQ ID NO: 2293 - RNA, 20 nt, synthetic construct
  source 1..20: mol_type = other RNA
agtctgcaaacacagagctc

SEQ ID NO: 2294 - RNA, 20 nt, synthetic construct
  source 1..20: mol_type = other RNA
tgtgccagagcaggatctac

SEQ ID NO: 2295 - RNA, 20 nt, synthetic construct
  source 1..20: mol_type = other RNA
gtgccagagcaggatctact

SEQ ID NO: 2296 - RNA, 20 nt, synthetic construct
  source 1..20: mol_type = other RNA
gacacacagcagttcttgtc

SEQ ID NO: 2297 - RNA, 20 nt, synthetic construct
  source 1..20: mol_type = other RNA
ctgcaagcgtttgctcacca

SEQ ID NO: 2298 - RNA, 20 nt, synthetic construct
  source 1..20: mol_type = other RNA
ttccaggtgactctatgctt

SEQ ID NO: 2299 - RNA, 20 nt, synthetic construct
  source 1..20: mol_type = other RNA
ccttctcatggcaggtgtcc

SEQ ID NO: 2300 - RNA, 20 nt, synthetic construct
  source 1..20: mol_type = other RNA
cccacagattcagggactcc

SEQ ID NO: 2301 - RNA, 20 nt, synthetic construct
  source 1..20: mol_type = other RNA
acccacagattcagggactc

SEQ ID NO: 2302 - RNA, 20 nt, synthetic construct
  source 1..20: mol_type = other RNA
gctctttaccttaaaaatgg

SEQ ID NO: 2303 - RNA, 20 nt, synthetic construct
  source 1..20: mol_type = other RNA
ttacatttttgctcttcctc

SEQ ID NO: 2304 - RNA, 20 nt, synthetic construct
  source 1..20: mol_type = other RNA
gaaggctgcacagtcagggg

SEQ ID NO: 2305 - RNA, 20 nt, synthetic construct
  source 1..20: mol_type = other RNA
aaggctgcacagtcagggga

SEQ ID NO: 2306 - RNA, 20 nt, synthetic construct
  source 1..20: mol_type = other RNA
acagaaggctgcacagtcag

SEQ ID NO: 2307 - RNA, 20 nt, synthetic construct
  source 1..20: mol_type = other RNA
caccatctgggagaatgctg

SEQ ID NO: 2308 - RNA, 20 nt, synthetic construct
  source 1..20: mol_type = other RNA
ggagaatgctgtggacaaga

SEQ ID NO: 2309 - RNA, 20 nt, synthetic construct
  source 1..20: mol_type = other RNA
ggtacagacctcggaagaac

SEQ ID NO: 2310 - RNA, 20 nt, synthetic construct
  source 1..20: mol_type = other RNA
cagacctcggaagaactggc

SEQ ID NO: 2311 - RNA, 20 nt, synthetic construct
  source 1..20: mol_type = other RNA
ctgcagctctggaatgacac

SEQ ID NO: 2312 - RNA, 20 nt, synthetic construct
  source 1..20: mol_type = other RNA
gcacatccgggcggcccagg

SEQ ID NO: 2313 - RNA, 20 nt, synthetic construct
  source 1..20: mol_type = other RNA
ggatacggccgggcccctgg

SEQ ID NO: 2314 - RNA, 20 nt, synthetic construct
  source 1..20: mol_type = other RNA
tctggtcagggctcggacac

SEQ ID NO: 2315 - RNA, 20 nt, synthetic construct
  source 1..20: mol_type = other RNA
ggacagtacttttacccccg

SEQ ID NO: 2316 - RNA, 20 nt, synthetic construct
  source 1..20: mol_type = other RNA
gagcaggagggcttcgccga

SEQ ID NO: 2317 - RNA, 20 nt, synthetic construct
  source 1..20: mol_type = other RNA
gcgcagctgggcttgggccg

SEQ ID NO: 2318 - RNA, 20 nt, synthetic construct
  source 1..20: mol_type = other RNA
ggaaccgcagaccgtgccgg

SEQ ID NO: 2319 - RNA, 20 nt, synthetic construct
  source 1..20: mol_type = other RNA
cagccgggacgccacgccgc

SEQ ID NO: 2320 - RNA, 20 nt, synthetic construct
  source 1..20: mol_type = other RNA
agaccaagagcgcatcaaag

SEQ ID NO: 2321 - RNA, 20 nt, synthetic construct
  source 1..20: mol_type = other RNA
caagcggctgcggaaccggc

SEQ ID NO: 2322 - RNA, 20 nt, synthetic construct
  source 1..20: mol_type = other RNA
gcggctgcggaaccggctgg

SEQ ID NO: 2323 - RNA, 20 nt, synthetic construct
  source 1..20: mol_type = other RNA
tctctttccatcttctgtcg

SEQ ID NO: 2324 - RNA, 20 nt, synthetic construct
  source 1..20: mol_type = other RNA
atgacttaccctcctgcgtg

SEQ ID NO: 2325 - RNA, 20 nt, synthetic construct
  source 1..20: mol_type = other RNA
cttaccctcctgcgtgtgga

SEQ ID NO: 2326 - RNA, 20 nt, synthetic construct
  source 1..20: mol_type = other RNA
tggggttcaaacattccgcc

SEQ ID NO: 2327 - RNA, 20 nt, synthetic construct
  source 1..20: mol_type = other RNA
agctttctgtaaacaggggc

SEQ ID NO: 2328 - RNA, 20 nt, synthetic construct
  source 1..20: mol_type = other RNA
tactgaccagctgaggagcc

SEQ ID NO: 2329 - RNA, 20 nt, synthetic construct
  source 1..20: mol_type = other RNA
ctactgaccagctgaggagc

SEQ ID NO: 2330 - RNA, 20 nt, synthetic construct
  source 1..20: mol_type = other RNA
catctaagaaagacagaaac

SEQ ID NO: 2331 - RNA, 20 nt, synthetic construct
  source 1..20: mol_type = other RNA
gggggccctaaggacagtcg

SEQ ID NO: 2332 - RNA, 20 nt, synthetic construct
  source 1..20: mol_type = other RNA
ggggggccctaaggacagtc

SEQ ID NO: 2333 - RNA, 20 nt, synthetic construct
  source 1..20: mol_type = other RNA
tgtcttggggagaaaataca

SEQ ID NO: 2334 - RNA, 20 nt, synthetic construct
  source 1..20: mol_type = other RNA
ggcctaagagggagagaccc

SEQ ID NO: 2335 - RNA, 20 nt, synthetic construct
  source 1..20: mol_type = other RNA
cccataccttagcgtggaaa

SEQ ID NO: 2336 - RNA, 20 nt, synthetic construct
  source 1..20: mol_type = other RNA
acccacccatgacagcttaa

SEQ ID NO: 2337 - RNA, 20 nt, synthetic construct
  source 1..20: mol_type = other RNA
tagacctaccttaatcatgg

SEQ ID NO: 2338 - RNA, 20 nt, synthetic construct
  source 1..20: mol_type = other RNA
cacaactcctggggacagtc

SEQ ID NO: 2339 - RNA, 20 nt, synthetic construct
  source 1..20: mol_type = other RNA
aacttacatagagaataaag

SEQ ID NO: 2340 - RNA, 20 nt, synthetic construct
  source 1..20: mol_type = other RNA
acttacatagagaataaaga

SEQ ID NO: 2341 - RNA, 20 nt, synthetic construct
  source 1..20: mol_type = other RNA
gaaccagatcaggagccaac

SEQ ID NO: 2342 - RNA, 20 nt, synthetic construct
  source 1..20: mol_type = other RNA
ctgtgtactgaggggcagaa

SEQ ID NO: 2343 - RNA, 20 nt, synthetic construct
  source 1..20: mol_type = other RNA
gctgtgtactgaggggcaga

SEQ ID NO: 2344 - RNA, 20 nt, synthetic construct
  source 1..20: mol_type = other RNA
tgtactgaggggcagaaggg

SEQ ID NO: 2345 - RNA, 20 nt, synthetic construct
  source 1..20: mol_type = other RNA
ggtgctcccaggagcggagg

SEQ ID NO: 2346 - RNA, 20 nt, synthetic construct
  source 1..20: mol_type = other RNA
agaggaacaaggagacattg

SEQ ID NO: 2347 - RNA, 20 nt, synthetic construct
  source 1..20: mol_type = other RNA
gactcactcttctgtttcta

SEQ ID NO: 2348 - RNA, 20 nt, synthetic construct
  source 1..20: mol_type = other RNA
gaaaggcagcttttggcacc

SEQ ID NO: 2349 - RNA, 20 nt, synthetic construct
  source 1..20: mol_type = other RNA
agccacagaagccatgggat

SEQ ID NO: 2350 - RNA, 20 nt, synthetic construct
  source 1..20: mol_type = other RNA
cccccgggagtccatcaagt

SEQ ID NO: 2351 - RNA, 20 nt, synthetic construct
  source 1..20: mol_type = other RNA
taacctaggaagaaaaaaga

SEQ ID NO: 2352 - RNA, 20 nt, synthetic construct
  source 1..20: mol_type = other RNA
ctcacccttggccatgtact

SEQ ID NO: 2353 - RNA, 20 nt, synthetic construct
  source 1..20: mol_type = other RNA
cctgaactggaggtgaacaa

SEQ ID NO: 2354 - RNA, 20 nt, synthetic construct
  source 1..20: mol_type = other RNA
tgcaatctgaaaacagaaat

SEQ ID NO: 2355 - RNA, 20 nt, synthetic construct
  source 1..20: mol_type = other RNA
cacctaaggaagaagatatg

SEQ ID NO: 2356 - RNA, 20 nt, synthetic construct
  source 1..20: mol_type = other RNA
agcagcagccttagagcaca

SEQ ID NO: 2357 - RNA, 20 nt, synthetic construct
  source 1..20: mol_type = other RNA
cactcacccgcagggaggag

SEQ ID NO: 2358 - RNA, 20 nt, synthetic construct
  source 1..20: mol_type = other RNA
aggatcctggagaggaagga

SEQ ID NO: 2359 - RNA, 20 nt, synthetic construct
  source 1..20: mol_type = other RNA
ggatcctggagaggaaggag

SEQ ID NO: 2360 - RNA, 20 nt, synthetic construct
  source 1..20: mol_type = other RNA
gatgaccaactctgggtagg

SEQ ID NO: 2361 - RNA, 20 nt, synthetic construct
  source 1..20: mol_type = other RNA
ccttaccctcaggatttctc

SEQ ID NO: 2362 - RNA, 20 nt, synthetic construct
  source 1..20: mol_type = other RNA
gtgattcaccgggatatcaa

SEQ ID NO: 2363 - RNA, 20 nt, synthetic construct
  source 1..20: mol_type = other RNA
caactgtgggaggaagaaaa

SEQ ID NO: 2364 - RNA, 20 nt, synthetic construct
  source 1..20: mol_type = other RNA
gcctcttactctgtaatcat

SEQ ID NO: 2365 - RNA, 20 nt, synthetic construct
  source 1..20: mol_type = other RNA
tcttactctgtaatcatagg

SEQ ID NO: 2366 - RNA, 20 nt, synthetic construct
  source 1..20: mol_type = other RNA
agagagctggggagaggaga

SEQ ID NO: 2367 - RNA, 20 nt, synthetic construct
  source 1..20: mol_type = other RNA
ctgaacaggaaggagagcca

SEQ ID NO: 2368 - RNA, 20 nt, synthetic construct
  source 1..20: mol_type = other RNA
atggaactgttggaaaaagc

SEQ ID NO: 2369 - RNA, 20 nt, synthetic construct
  source 1..20: mol_type = other RNA
ttgagcagcagaaagaacag

SEQ ID NO: 2370 - RNA, 20 nt, synthetic construct
  source 1..20: mol_type = other RNA
ggagagagcgggaagctaga

SEQ ID NO: 2371 - RNA, 20 nt, synthetic construct
  source 1..20: mol_type = other RNA
ccttcagcagcagctgctcc

SEQ ID NO: 2372 - RNA, 20 nt, synthetic construct
  source 1..20: mol_type = other RNA
ggcactccttggagagggag

SEQ ID NO: 2373 - RNA, 20 nt, synthetic construct
  source 1..20: mol_type = other RNA
ctcccgccatcggcactcct

SEQ ID NO: 2374 - RNA, 20 nt, synthetic construct
  source 1..20: mol_type = other RNA
gaagcccagtctaagcagac

SEQ ID NO: 2375 - RNA, 20 nt, synthetic construct
  source 1..20: mol_type = other RNA
gtcgctacctgtggctccgc

SEQ ID NO: 2376 - RNA, 20 nt, synthetic construct
  source 1..20: mol_type = other RNA
tagaccaagccttttgggta

SEQ ID NO: 2377 - RNA, 20 nt, synthetic construct
  source 1..20: mol_type = other RNA
gggcagcagaatagccaggc

SEQ ID NO: 2378 - RNA, 20 nt, synthetic construct
  source 1..20: mol_type = other RNA
aggcttctgtgggagagagt

SEQ ID NO: 2379 - RNA, 20 nt, synthetic construct
  source 1..20: mol_type = other RNA
tgggtctcagagtggctccg

SEQ ID NO: 2380 - RNA, 20 nt, synthetic construct
  source 1..20: mol_type = other RNA
atgatgctgttgggttcaaa

SEQ ID NO: 2381 - RNA, 20 nt, synthetic construct
  source 1..20: mol_type = other RNA
tgatgctgttgggttcaaaa

SEQ ID NO: 2382 - RNA, 20 nt, synthetic construct
  source 1..20: mol_type = other RNA
atccttacagcaggcttgag

SEQ ID NO: 2383 - RNA, 20 nt, synthetic construct
  source 1..20: mol_type = other RNA
aatccttacagcaggcttga

SEQ ID NO: 2384 - RNA, 20 nt, synthetic construct
  source 1..20: mol_type = other RNA
taggccacagagtgacaccc

SEQ ID NO: 2385 - RNA, 20 nt, synthetic construct
  source 1..20: mol_type = other RNA
ccgaagacgatttcaacaaa

SEQ ID NO: 2386 - RNA, 20 nt, synthetic construct
  source 1..20: mol_type = other RNA
aagcagggatggacaaccgt

SEQ ID NO: 2387 - RNA, 20 nt, synthetic construct
  source 1..20: mol_type = other RNA
tccccagcccattgtctgat

SEQ ID NO: 2388 - RNA, 20 nt, synthetic construct
  source 1..20: mol_type = other RNA
gagatccgatctgtggaaac

SEQ ID NO: 2389 - RNA, 20 nt, synthetic construct
  source 1..20: mol_type = other RNA
cactcaccacacagagccat

SEQ ID NO: 2390 - RNA, 20 nt, synthetic construct
  source 1..20: mol_type = other RNA
ttaccagaacctgtctccag

SEQ ID NO: 2391 - RNA, 20 nt, synthetic construct
  source 1..20: mol_type = other RNA
agcagcactaaggagaaaaa

SEQ ID NO: 2392 - RNA, 20 nt, synthetic construct
  source 1..20: mol_type = other RNA
gcagcactaaggagaaaaaa

SEQ ID NO: 2393 - RNA, 20 nt, synthetic construct
  source 1..20: mol_type = other RNA
aggtcctaggaagcaaatac

SEQ ID NO: 2394 - RNA, 20 nt, synthetic construct
  source 1..20: mol_type = other RNA
ggtcctaggaagcaaataca

SEQ ID NO: 2395 - RNA, 20 nt, synthetic construct
  source 1..20: mol_type = other RNA
cagaatctaaagggcagaag

SEQ ID NO: 2396 - RNA, 20 nt, synthetic construct
  source 1..20: mol_type = other RNA
atccagttcagcatgatctc

SEQ ID NO: 2397 - RNA, 20 nt, synthetic construct
  source 1..20: mol_type = other RNA
aatacctcagttgccggtgc

SEQ ID NO: 2398 - RNA, 20 nt, synthetic construct
  source 1..20: mol_type = other RNA
cccactgaccaaatatcaac

SEQ ID NO: 2399 - RNA, 20 nt, synthetic construct
  source 1..20: mol_type = other RNA
tatctaatggtggaccataa

SEQ ID NO: 2400 - RNA, 20 nt, synthetic construct
  source 1..20: mol_type = other RNA
atatcttagatgcctagtca

SEQ ID NO: 2401 - RNA, 20 nt, synthetic construct
  source 1..20: mol_type = other RNA
cagcagattatgcgtctgac

SEQ ID NO: 2402 - RNA, 20 nt, synthetic construct
  source 1..20: mol_type = other RNA
tttcttgcctgaaaaaacaa

SEQ ID NO: 2403 - RNA, 20 nt, synthetic construct
  source 1..20: mol_type = other RNA
cagctatcagtaccatagac

SEQ ID NO: 2404 - RNA, 20 nt, synthetic construct
  source 1..20: mol_type = other RNA
atgatcagtcctttgaaagc

SEQ ID NO: 2405 - RNA, 20 nt, synthetic construct
  source 1..20: mol_type = other RNA
gtcaggcctagaaattggga

SEQ ID NO: 2406 - RNA, 20 nt, synthetic construct
  source 1..20: mol_type = other RNA
aagtcacctgcagagaagga

SEQ ID NO: 2407 - RNA, 20 nt, synthetic construct
  source 1..20: mol_type = other RNA
agtcacctgcagagaaggat

SEQ ID NO: 2408 - RNA, 20 nt, synthetic construct
  source 1..20: mol_type = other RNA
tgggcccacctcgatgatgt

SEQ ID NO: 2409 - RNA, 20 nt, synthetic construct
  source 1..20: mol_type = other RNA
ggaacagagccccctgctgg

SEQ ID NO: 2410 - RNA, 20 nt, synthetic construct
  source 1..20: mol_type = other RNA
caagtaccgacgcgccagcg

SEQ ID NO: 2411 - RNA, 20 nt, synthetic construct
  source 1..20: mol_type = other RNA
agcgcctggggggaaggggc

SEQ ID NO: 2412 - RNA, 20 nt, synthetic construct
  source 1..20: mol_type = other RNA
aatgatgcagagttatagac

SEQ ID NO: 2413 - RNA, 20 nt, synthetic construct
  source 1..20: mol_type = other RNA
cagttgactagacagaaaga

SEQ ID NO: 2414 - RNA, 20 nt, synthetic construct
  source 1..20: mol_type = other RNA
ttgactagacagaaagatgg

SEQ ID NO: 2415 - RNA, 20 nt, synthetic construct
  source 1..20: mol_type = other RNA
tgactagacagaaagatgga

SEQ ID NO: 2416 - RNA, 20 nt, synthetic construct
  source 1..20: mol_type = other RNA
cccagcagccagcactacag

SEQ ID NO: 2417 - RNA, 20 nt, synthetic construct
  source 1..20: mol_type = other RNA
tgcactcaccaacagggctg

SEQ ID NO: 2418 - RNA, 20 nt, synthetic construct
  source 1..20: mol_type = other RNA
ctcaccaacagggctggggc

SEQ ID NO: 2419 - RNA, 20 nt, synthetic construct
  source 1..20: mol_type = other RNA
acctgcgagtcatcacttcc

SEQ ID NO: 2420 - RNA, 20 nt, synthetic construct
  source 1..20: mol_type = other RNA
ctcacctgtgttgtaggcag

SEQ ID NO: 2421 - RNA, 20 nt, synthetic construct
  source 1..20: mol_type = other RNA
tcacctgtgttgtaggcagt

SEQ ID NO: 2422 - RNA, 20 nt, synthetic construct
  source 1..20: mol_type = other RNA
acctcagcaacagtcccacc

SEQ ID NO: 2423 - RNA, 20 nt, synthetic construct
  source 1..20: mol_type = other RNA
cccgggctggaggcaggcaa

SEQ ID NO: 2424 - RNA, 20 nt, synthetic construct
  source 1..20: mol_type = other RNA
atgtctgtgaagagaggaga

SEQ ID NO: 2425 - RNA, 20 nt, synthetic construct
  source 1..20: mol_type = other RNA
tttgcagcgcattggcaagt

SEQ ID NO: 2426 - RNA, 20 nt, synthetic construct
  source 1..20: mol_type = other RNA
tccggcgaatggctgacgca

SEQ ID NO: 2427 - RNA, 20 nt, synthetic construct
  source 1..20: mol_type = other RNA
cgaggacctggaaaacaaag

SEQ ID NO: 2428 - RNA, 20 nt, synthetic construct
  source 1..20: mol_type = other RNA
cacttactggtaatgaaccc

SEQ ID NO: 2429 - RNA, 20 nt, synthetic construct
  source 1..20: mol_type = other RNA
ctccgagtccttgattcatt

SEQ ID NO: 2430 - RNA, 20 nt, synthetic construct
  source 1..20: mol_type = other RNA
cagattccattttccccaag

SEQ ID NO: 2431 - RNA, 20 nt, synthetic construct
  source 1..20: mol_type = other RNA
tcagattccattttccccaa

SEQ ID NO: 2432 - RNA, 20 nt, synthetic construct
  source 1..20: mol_type = other RNA
gaaggccatgcctggaacac

SEQ ID NO: 2433 - RNA, 20 nt, synthetic construct
  source 1..20: mol_type = other RNA
ttaccttggtttctcgaaga

SEQ ID NO: 2434 - RNA, 20 nt, synthetic construct
  source 1..20: mol_type = other RNA
atgcttacctctctcagagt

SEQ ID NO: 2435 - RNA, 20 nt, synthetic construct
  source 1..20: mol_type = other RNA
caacaatcaggaggaagtag

SEQ ID NO: 2436 - RNA, 20 nt, synthetic construct
  source 1..20: mol_type = other RNA
gtggccacatcacttgccca

SEQ ID NO: 2437 - RNA, 20 nt, synthetic construct
  source 1..20: mol_type = other RNA
gcccgggcagtcctgcaagc

SEQ ID NO: 2438 - RNA, 20 nt, synthetic construct
  source 1..20: mol_type = other RNA
gtacctgaagaggaagagaa

SEQ ID NO: 2439 - RNA, 20 nt, synthetic construct
  source 1..20: mol_type = other RNA
ccctgccgggacttcatcaa

SEQ ID NO: 2440 - RNA, 20 nt, synthetic construct
  source 1..20: mol_type = other RNA
ttaccatggcatcgtagcgc

SEQ ID NO: 2441 - RNA, 20 nt, synthetic construct
  source 1..20: mol_type = other RNA
aggccacagcaccgcgccca

SEQ ID NO: 2442 - RNA, 20 nt, synthetic construct
  source 1..20: mol_type = other RNA
cgctcagaaagtgaggggtg

SEQ ID NO: 2443 - RNA, 20 nt, synthetic construct
  source 1..20: mol_type = other RNA
gtagtccaggcctatgcttt

SEQ ID NO: 2444 - RNA, 20 nt, synthetic construct
  source 1..20: mol_type = other RNA
gatctagaagaaagaaaaga

SEQ ID NO: 2445 - RNA, 20 nt, synthetic construct
  source 1..20: mol_type = other RNA
ttaccattgcatcacaaatc

SEQ ID NO: 2446 - RNA, 20 nt, synthetic construct
  source 1..20: mol_type = other RNA
gtgacttaccgcccacctgc

SEQ ID NO: 2447 - RNA, 20 nt, synthetic construct
  source 1..20: mol_type = other RNA
ctcccaggtaattgtgcctg

SEQ ID NO: 2448 - RNA, 20 nt, synthetic construct
  source 1..20: mol_type = other RNA
aggtgaccaagatatcaacg

SEQ ID NO: 2449 - RNA, 20 nt, synthetic construct
  source 1..20: mol_type = other RNA
ggtcggatcaagttttccac

SEQ ID NO: 2450 - RNA, 20 nt, synthetic construct
  source 1..20: mol_type = other RNA
ttatcatcctgaaacaagag

SEQ ID NO: 2451 - RNA, 20 nt, synthetic construct
  source 1..20: mol_type = other RNA
ttcagtctgaaaaagaagag

SEQ ID NO: 2452 - RNA, 20 nt, synthetic construct
  source 1..20: mol_type = other RNA
aaggaacagacgggctctga

SEQ ID NO: 2453 - RNA, 20 nt, synthetic construct
  source 1..20: mol_type = other RNA
gaaattaccttttgcagaag

SEQ ID NO: 2454 - RNA, 20 nt, synthetic construct
  source 1..20: mol_type = other RNA
agaaattaccttttgcagaa

SEQ ID NO: 2455 - RNA, 20 nt, synthetic construct
  source 1..20: mol_type = other RNA
gttgcctgagaaagaaaaag

SEQ ID NO: 2456 - RNA, 20 nt, synthetic construct
  source 1..20: mol_type = other RNA
ctctcccaggcacaagacac

SEQ ID NO: 2457 - RNA, 20 nt, synthetic construct
  source 1..20: mol_type = other RNA
ccgccatgccggccgcgctg

SEQ ID NO: 2458 - RNA, 20 nt, synthetic construct
  source 1..20: mol_type = other RNA
gaagtgaccaagttcactcc

SEQ ID NO: 2459 - RNA, 20 nt, synthetic construct
  source 1..20: mol_type = other RNA
caatccacctgaaagataaa

SEQ ID NO: 2460 - RNA, 20 nt, synthetic construct
  source 1..20: mol_type = other RNA
aatccacctgaaagataaaa

SEQ ID NO: 2461 - RNA, 20 nt, synthetic construct
  source 1..20: mol_type = other RNA
gttatttcagatattcagcc

SEQ ID NO: 2462 - RNA, 20 nt, synthetic construct
  source 1..20: mol_type = other RNA
tgttttcacaaggttgtaat

SEQ ID NO: 2463 - RNA, 20 nt, synthetic construct
  source 1..20: mol_type = other RNA
tggattcagcagtacagttt

SEQ ID NO: 2464 - RNA, 20 nt, synthetic construct
  source 1..20: mol_type = other RNA
aaaacacaggtaagtgtttg

SEQ ID NO: 2465 - RNA, 20 nt, synthetic construct
  source 1..20: mol_type = other RNA
aaacacaggtaagtgtttgc

SEQ ID NO: 2466 - RNA, 20 nt, synthetic construct
  source 1..20: mol_type = other RNA
aacacaggtaagtgtttgcg

SEQ ID NO: 2467 - RNA, 20 nt, synthetic construct
  source 1..20: mol_type = other RNA
tgaacaaatgaagactaaaa

SEQ ID NO: 2468 - RNA, 20 nt, synthetic construct
  source 1..20: mol_type = other RNA
actagagcaggtaaccgggg

SEQ ID NO: 2469 - RNA, 20 nt, synthetic construct
  source 1..20: mol_type = other RNA
atctccggccagtccctgag

SEQ ID NO: 2470 - RNA, 20 nt, synthetic construct
  source 1..20: mol_type = other RNA
gacagatgcagatcaccctg

SEQ ID NO: 2471 - RNA, 20 nt, synthetic construct
  source 1..20: mol_type = other RNA
aggaagtccagacatcggcc

SEQ ID NO: 2472 - RNA, 20 nt, synthetic construct
  source 1..20: mol_type = other RNA
tggattcccaggacagcaca

SEQ ID NO: 2473 - RNA, 20 nt, synthetic construct
  source 1..20: mol_type = other RNA
gcccaccttgttagtttcac

SEQ ID NO: 2474 - RNA, 20 nt, synthetic construct
  source 1..20: mol_type = other RNA
aaaccttcaggagaaggaag

SEQ ID NO: 2475 - RNA, 20 nt, synthetic construct
  source 1..20: mol_type = other RNA
gctgagatctaggagacaaa

SEQ ID NO: 2476 - RNA, 20 nt, synthetic construct
  source 1..20: mol_type = other RNA
gatacagactctcaacagag

SEQ ID NO: 2477 - RNA, 20 nt, synthetic construct
  source 1..20: mol_type = other RNA
ccattcaaggggacccacag

SEQ ID NO: 2478 - RNA, 20 nt, synthetic construct
  source 1..20: mol_type = other RNA
ggggcagtcgcttacagttc

SEQ ID NO: 2479 - RNA, 20 nt, synthetic construct
  source 1..20: mol_type = other RNA
acttaccctctgacttcata

SEQ ID NO: 2480 - RNA, 20 nt, synthetic construct
  source 1..20: mol_type = other RNA
acagagcaaaaaatgaccag

SEQ ID NO: 2481 - RNA, 20 nt, synthetic construct
  source 1..20: mol_type = other RNA
ttacctgtttctccagtagt

SEQ ID NO: 2482 - RNA, 20 nt, synthetic construct
  source 1..20: mol_type = other RNA
acgcctacaattggaaaaca

SEQ ID NO: 2483 - RNA, 20 nt, synthetic construct
  source 1..20: mol_type = other RNA
cgcctacaattggaaaacaa

SEQ ID NO: 2484 - RNA, 20 nt, synthetic construct
  source 1..20: mol_type = other RNA
ttcctgcaggattactttga

SEQ ID NO: 2485 - RNA, 20 nt, synthetic construct
  source 1..20: mol_type = other RNA
tgctgagctgttaataaaac

SEQ ID NO: 2486 - RNA, 20 nt, synthetic construct
  source 1..20: mol_type = other RNA
tcacttacttcatatttctt

SEQ ID NO: 2487 - RNA, 20 nt, synthetic construct
  source 1..20: mol_type = other RNA
ccagccgcagcccctaagtc

SEQ ID NO: 2488 - RNA, 20 nt, synthetic construct
  source 1..20: mol_type = other RNA
tggccgggccaggatgggag

SEQ ID NO: 2489 - RNA, 20 nt, synthetic construct
  source 1..20: mol_type = other RNA
acgggcagctagtgagccag

SEQ ID NO: 2490 - RNA, 20 nt, synthetic construct
  source 1..20: mol_type = other RNA
cgggcagctagtgagccaga

SEQ ID NO: 2491 - RNA, 20 nt, synthetic construct
  source 1..20: mol_type = other RNA
ggcctggcagggatggaggg

SEQ ID NO: 2492 - RNA, 20 nt, synthetic construct
  source 1..20: mol_type = other RNA
catggcctggcagggatgga

SEQ ID NO: 2493 - RNA, 20 nt, synthetic construct
  source 1..20: mol_type = other RNA
ccatggcctggcagggatgg

SEQ ID NO: 2494 - RNA, 20 nt, synthetic construct
  source 1..20: mol_type = other RNA
taacgtcccagttctgattc

SEQ ID NO: 2495 - RNA, 20 nt, synthetic construct
  source 1..20: mol_type = other RNA
gaatcagaactgggacgtta

SEQ ID NO: 2496 - RNA, 20 nt, synthetic construct
  source 1..20: mol_type = other RNA
tgcacctgggggcaggccaa

SEQ ID NO: 2497 - RNA, 20 nt, synthetic construct
  source 1..20: mol_type = other RNA
tcatacctggtggcataggc

SEQ ID NO: 2498 - RNA, 20 nt, synthetic construct
  source 1..20: mol_type = other RNA
cctgctgcagatcttccctg

SEQ ID NO: 2499 - RNA, 20 nt, synthetic construct
  source 1..20: mol_type = other RNA
tacctggagaccagggtggt

SEQ ID NO: 2500 - RNA, 20 nt, synthetic construct
  source 1..20: mol_type = other RNA
ggcgtacctggagaccaggg

SEQ ID NO: 2501 - RNA, 20 nt, synthetic construct
  source 1..20: mol_type = other RNA
cctgatgctgggggtgagag

SEQ ID NO: 2502 - RNA, 20 nt, synthetic construct
  source 1..20: mol_type = other RNA
tcctgatgctgggggtgaga

SEQ ID NO: 2503 - RNA, 20 nt, synthetic construct
  source 1..20: mol_type = other RNA
cggcagtactgcgagctgtg

SEQ ID NO: 2504 - RNA, 20 nt, synthetic construct
  source 1..20: mol_type = other RNA
cggacagcagatcggcgacg

SEQ ID NO: 2505 - RNA, 20 nt, synthetic construct
  source 1..20: mol_type = other RNA
gcttcttccagtcctgacgc

SEQ ID NO: 2506 - RNA, 20 nt, synthetic construct
  source 1..20: mol_type = other RNA
tactaccttgtagcatatgc

SEQ ID NO: 2507 - RNA, 20 nt, synthetic construct
  source 1..20: mol_type = other RNA
atacttcgaatttttccaga

SEQ ID NO: 2508 - RNA, 20 nt, synthetic construct
  source 1..20: mol_type = other RNA
gtcaagcagctgcactgcac

SEQ ID NO: 2509 - RNA, 20 nt, synthetic construct
  source 1..20: mol_type = other RNA
tcaagcagctgcactgcacc

SEQ ID NO: 2510 - RNA, 20 nt, synthetic construct
  source 1..20: mol_type = other RNA
caagcagctgcactgcaccg

SEQ ID NO: 2511 - RNA, 20 nt, synthetic construct
  source 1..20: mol_type = other RNA
gtagctgaaagacacaaaga

SEQ ID NO: 2512 - RNA, 20 nt, synthetic construct
  source 1..20: mol_type = other RNA
tagctgaaagacacaaagaa

SEQ ID NO: 2513 - RNA, 20 nt, synthetic construct
  source 1..20: mol_type = other RNA
ctattacctggttgcgtaag

SEQ ID NO: 2514 - RNA, 20 nt, synthetic construct
  source 1..20: mol_type = other RNA
tattacctggttgcgtaaga

SEQ ID NO: 2515 - RNA, 20 nt, synthetic construct
  source 1..20: mol_type = other RNA
atcctgcggatatttccaga

SEQ ID NO: 2516 - RNA, 20 nt, synthetic construct
  source 1..20: mol_type = other RNA
tcctgcggatatttccagag

SEQ ID NO: 2517 - RNA, 20 nt, synthetic construct
  source 1..20: mol_type = other RNA
tccctgggttggggacagaa

SEQ ID NO: 2518 - RNA, 20 nt, synthetic construct
  source 1..20: mol_type = other RNA
atacctgcttgatggtgctg

SEQ ID NO: 2519 - RNA, 20 nt, synthetic construct
  source 1..20: mol_type = other RNA
ccttggtccagaattccatg

SEQ ID NO: 2520 - RNA, 20 nt, synthetic construct
  source 1..20: mol_type = other RNA
gcagctggagggacagtcac

SEQ ID NO: 2521 - RNA, 20 nt, synthetic construct
  source 1..20: mol_type = other RNA
gcggtgccacagcagctgga

SEQ ID NO: 2522 - RNA, 20 nt, synthetic construct
  source 1..20: mol_type = other RNA
cgcggtgccacagcagctgg

SEQ ID NO: 2523 - RNA, 20 nt, synthetic construct
  source 1..20: mol_type = other RNA
ggcccccaggtttgagccga

SEQ ID NO: 2524 - RNA, 20 nt, synthetic construct
  source 1..20: mol_type = other RNA
aggcccccaggtttgagccg

SEQ ID NO: 2525 - RNA, 20 nt, synthetic construct
  source 1..20: mol_type = other RNA
ctctcctgtggggaggaggg

SEQ ID NO: 2526 - RNA, 20 nt, synthetic construct
  source 1..20: mol_type = other RNA
aagctctcctgtggggagga

SEQ ID NO: 2527 - RNA, 20 nt, synthetic construct
  source 1..20: mol_type = other RNA
ctcacctggaactggcagag

SEQ ID NO: 2528 - RNA, 20 nt, synthetic construct
  source 1..20: mol_type = other RNA
tcacctggaactggcagagc

SEQ ID NO: 2529 - RNA, 20 nt, synthetic construct
  source 1..20: mol_type = other RNA
gatgtactgagacggggtgc

SEQ ID NO: 2530 - RNA, 20 nt, synthetic construct
  source 1..20: mol_type = other RNA
atgtactgagacggggtgca

SEQ ID NO: 2531 - RNA, 20 nt, synthetic construct
  source 1..20: mol_type = other RNA
tctcaccttcttcgcaggaa

SEQ ID NO: 2532 - RNA, 20 nt, synthetic construct
  source 1..20: mol_type = other RNA
ctcaccttcttcgcaggaat

SEQ ID NO: 2533 - RNA, 20 nt, synthetic construct
  source 1..20: mol_type = other RNA
aggctgggggccggggaagc

SEQ ID NO: 2534 - RNA, 20 nt, synthetic construct
  source 1..20: mol_type = other RNA
ccccaccttcatccgctcgt

SEQ ID NO: 2535 - RNA, 20 nt, synthetic construct
  source 1..20: mol_type = other RNA
caccagctgtagaaggtgcc

SEQ ID NO: 2536 - RNA, 20 nt, synthetic construct
  source 1..20: mol_type = other RNA
ccaccagctgtagaaggtgc

SEQ ID NO: 2537 - RNA, 20 nt, synthetic construct
  source 1..20: mol_type = other RNA
gtgcaggccgggcttttcca

SEQ ID NO: 2538 - RNA, 20 nt, synthetic construct
  source 1..20: mol_type = other RNA
gtcctgcagaaggacagggc

SEQ ID NO: 2539 - RNA, 20 nt, synthetic construct
  source 1..20: mol_type = other RNA
ggcagtcctgcagaaggaca

SEQ ID NO: 2540 - RNA, 20 nt, synthetic construct
  source 1..20: mol_type = other RNA
gggcagtcctgcagaaggac

SEQ ID NO: 2541 - RNA, 20 nt, synthetic construct
  source 1..20: mol_type = other RNA
caaggaccagcttaagaccg

SEQ ID NO: 2542 - RNA, 20 nt, synthetic construct
  source 1..20: mol_type = other RNA
acaaggaccagcttaagacc

SEQ ID NO: 2543 - RNA, 20 nt, synthetic construct
  source 1..20: mol_type = other RNA
cactgaccttctccagggcg

SEQ ID NO: 2544 - RNA, 20 nt, synthetic construct
  source 1..20: mol_type = other RNA
ccactgaccttctccagggc

SEQ ID NO: 2545 - RNA, 20 nt, synthetic construct
  source 1..20: mol_type = other RNA
aggcgcatccacagcagctc

SEQ ID NO: 2546 - RNA, 20 nt, synthetic construct
  source 1..20: mol_type = other RNA
tttgttgcagatcttggagc

SEQ ID NO: 2547 - RNA, 20 nt, synthetic construct
  source 1..20: mol_type = other RNA
tgttgcagatcttggagctg

SEQ ID NO: 2548 - RNA, 20 nt, synthetic construct
  source 1..20: mol_type = other RNA
ttgttgcagatcttggagct

SEQ ID NO: 2549 - RNA, 20 nt, synthetic construct
  source 1..20: mol_type = other RNA
agctgctgaggggtgtgggc

SEQ ID NO: 2550 - RNA, 20 nt, synthetic construct
  source 1..20: mol_type = other RNA
ctgcagctgctgaggggtgt

SEQ ID NO: 2551 - RNA, 20 nt, synthetic construct
  source 1..20: mol_type = other RNA
gctgcagctgctgaggggtg

SEQ ID NO: 2552 - RNA, 20 nt, synthetic construct
  source 1..20: mol_type = other RNA
tgtggcccaggtgggtgggg

SEQ ID NO: 2553 - RNA, 20 nt, synthetic construct
  source 1..20: mol_type = other RNA
agagcatctggggggagccg

SEQ ID NO: 2554 - RNA, 20 nt, synthetic construct
  source 1..20: mol_type = other RNA
atcgtccctgcagggaagga

SEQ ID NO: 2555 - RNA, 20 nt, synthetic construct
  source 1..20: mol_type = other RNA
gctaccggaggtgccagaaa

SEQ ID NO: 2556 - RNA, 20 nt, synthetic construct
  source 1..20: mol_type = other RNA
ggagctggaaggtgaaggga

SEQ ID NO: 2557 - RNA, 20 nt, synthetic construct
  source 1..20: mol_type = other RNA
cggagctggaaggtgaaggg

SEQ ID NO: 2558 - RNA, 20 nt, synthetic construct
  source 1..20: mol_type = other RNA
tctcggagctggaaggtgaa

SEQ ID NO: 2559 - RNA, 20 nt, synthetic construct
  source 1..20: mol_type = other RNA
gatgaagcaggtgaggccca

SEQ ID NO: 2560 - RNA, 20 nt, synthetic construct
  source 1..20: mol_type = other RNA
cccctggtgggcagatggga

SEQ ID NO: 2561 - RNA, 20 nt, synthetic construct
  source 1..20: mol_type = other RNA
ccccctggtgggcagatggg

SEQ ID NO: 2562 - RNA, 20 nt, synthetic construct
  source 1..20: mol_type = other RNA
cttccccctggtgggcagat

SEQ ID NO: 2563 - RNA, 20 nt, synthetic construct
  source 1..20: mol_type = other RNA
gcttccccctggtgggcaga

SEQ ID NO: 2564 - RNA, 20 nt, synthetic construct
  source 1..20: mol_type = other RNA
ctcaccagacttcagccagc

SEQ ID NO: 2565 - RNA, 20 nt, synthetic construct
  source 1..20: mol_type = other RNA
tcaccagacttcagccagca

SEQ ID NO: 2566 - RNA, 20 nt, synthetic construct
  source 1..20: mol_type = other RNA
acgctgccaggccagagagc

SEQ ID NO: 2567 - RNA, 20 nt, synthetic construct
  source 1..20: mol_type = other RNA
cacgctgccaggccagagag

SEQ ID NO: 2568 - RNA, 20 nt, synthetic construct
  source 1..20: mol_type = other RNA
gatccacaggggcttcatct

SEQ ID NO: 2569 - RNA, 20 nt, synthetic construct
  source 1..20: mol_type = other RNA
ggtctgtgccaccggccggt

SEQ ID NO: 2570 - RNA, 20 nt, synthetic construct
  source 1..20: mol_type = other RNA
aggtctgtgccaccggccgg

SEQ ID NO: 2571 - RNA, 20 nt, synthetic construct
  source 1..20: mol_type = other RNA
cggaggtctgtgccaccggc

SEQ ID NO: 2572 - RNA, 20 nt, synthetic construct
  source 1..20: mol_type = other RNA
cctgcagatgatccagctca

SEQ ID NO: 2573 - RNA, 20 nt, synthetic construct
  source 1..20: mol_type = other RNA
atcctaggcaagggggaaga

SEQ ID NO: 2574 - RNA, 20 nt, synthetic construct
  source 1..20: mol_type = other RNA
catcctaggcaagggggaag

SEQ ID NO: 2575 - RNA, 20 nt, synthetic construct
  source 1..20: mol_type = other RNA
cctgtacctgcccactctct

SEQ ID NO: 2576 - RNA, 20 nt, synthetic construct
  source 1..20: mol_type = other RNA
gagtgggcaggtacaggggc

SEQ ID NO: 2577 - RNA, 20 nt, synthetic construct
  source 1..20: mol_type = other RNA
aacagctgaggggaggggag

SEQ ID NO: 2578 - RNA, 20 nt, synthetic construct
  source 1..20: mol_type = other RNA
aacctgcaggtaggggacag

SEQ ID NO: 2579 - RNA, 20 nt, synthetic construct
  source 1..20: mol_type = other RNA
gtcctgcaaacaaatcacag

SEQ ID NO: 2580 - RNA, 20 nt, synthetic construct
  source 1..20: mol_type = other RNA
ggttttccagctctcacgga

SEQ ID NO: 2581 - RNA, 20 nt, synthetic construct
  source 1..20: mol_type = other RNA
tggttttccagctctcacgg

SEQ ID NO: 2582 - RNA, 20 nt, synthetic construct
  source 1..20: mol_type = other RNA
ggagaacagcagcctttgag

SEQ ID NO: 2583 - RNA, 20 nt, synthetic construct
  source 1..20: mol_type = other RNA
ctggtccaacttccactcaa

SEQ ID NO: 2584 - RNA, 20 nt, synthetic construct
  source 1..20: mol_type = other RNA
ctggcatccagtattgtttc

SEQ ID NO: 2585 - RNA, 20 nt, synthetic construct
  source 1..20: mol_type = other RNA
aatcaaactataaagaaaat

SEQ ID NO: 2586 - RNA, 20 nt, synthetic construct
  source 1..20: mol_type = other RNA
tcagtttacctatttcgagc

SEQ ID NO: 2587 - RNA, 20 nt, synthetic construct
  source 1..20: mol_type = other RNA
gtgtgcagttaaaagacctg

SEQ ID NO: 2588 - RNA, 20 nt, synthetic construct
  source 1..20: mol_type = other RNA
agggcacaagctatagcaat

SEQ ID NO: 2589 - RNA, 20 nt, synthetic construct
  source 1..20: mol_type = other RNA
tactctgaaaggatgaagac

SEQ ID NO: 2590 - RNA, 20 nt, synthetic construct
  source 1..20: mol_type = other RNA
acagaacagatagctgaaga

SEQ ID NO: 2591 - RNA, 20 nt, synthetic construct
  source 1..20: mol_type = other RNA
aatcttttagtgttgggaag

SEQ ID NO: 2592 - RNA, 20 nt, synthetic construct
  source 1..20: mol_type = other RNA
gaatcttttagtgttgggaa

SEQ ID NO: 2593 - RNA, 20 nt, synthetic construct
  source 1..20: mol_type = other RNA
agaatcttttagtgttggga

SEQ ID NO: 2594 - RNA, 20 nt, synthetic construct
  source 1..20: mol_type = other RNA
ctcctacctttttggtcagc

SEQ ID NO: 2595 - RNA, 20 nt, synthetic construct
  source 1..20: mol_type = other RNA
tcctacctttttggtcagca

SEQ ID NO: 2596 - RNA, 20 nt, synthetic construct
  source 1..20: mol_type = other RNA
gccttacagcaacctctcca

SEQ ID NO: 2597 - RNA, 20 nt, synthetic construct
  source 1..20: mol_type = other RNA
attcttacctgaagcacaat

SEQ ID NO: 2598 - RNA, 20 nt, synthetic construct
  source 1..20: mol_type = other RNA
aagcgtgtctggggaaaaag

SEQ ID NO: 2599 - RNA, 20 nt, synthetic construct
  source 1..20: mol_type = other RNA
gaatcgctagggtttggagg

SEQ ID NO: 2600 - RNA, 20 nt, synthetic construct
  source 1..20: mol_type = other RNA
cgaatcgctagggtttggag

SEQ ID NO: 2601 - RNA, 20 nt, synthetic construct
  source 1..20: mol_type = other RNA
acgaatcgctagggtttgga

SEQ ID NO: 2602 - RNA, 20 nt, synthetic construct
  source 1..20: mol_type = other RNA
aacacctactggattgttac

SEQ ID NO: 2603 - RNA, 20 nt, synthetic construct
  source 1..20: mol_type = other RNA
tggcatccagaacaaggagg

SEQ ID NO: 2604 - RNA, 20 nt, synthetic construct
  source 1..20: mol_type = other RNA
catccagaacaaggaggcgg

SEQ ID NO: 2605 - RNA, 20 nt, synthetic construct
  source 1..20: mol_type = other RNA
cgctactgcaggagatctac

SEQ ID NO: 2606 - RNA, 20 nt, synthetic construct
  source 1..20: mol_type = other RNA
ggtgcagatcatcaagaaga

SEQ ID NO: 2607 - RNA, 20 nt, synthetic construct
  source 1..20: mol_type = other RNA
ccacctgcagagcaaccacc

SEQ ID NO: 2608 - RNA, 20 nt, synthetic construct
  source 1..20: mol_type = other RNA
tcacctgtgtagctgctgga

SEQ ID NO: 2609 - RNA, 20 nt, synthetic construct
  source 1..20: mol_type = other RNA
ctcctcacctgtgtagctgc

SEQ ID NO: 2610 - RNA, 20 nt, synthetic construct
  source 1..20: mol_type = other RNA
gccacaggaggaagcccctg

SEQ ID NO: 2611 - RNA, 20 nt, synthetic construct
  source 1..20: mol_type = other RNA
agaggtctgcggacacacga

SEQ ID NO: 2612 - RNA, 20 nt, synthetic construct
  source 1..20: mol_type = other RNA
caactgcagatgggctgtga

SEQ ID NO: 2613 - RNA, 20 nt, synthetic construct
  source 1..20: mol_type = other RNA
aactgcagatgggctgtgac

SEQ ID NO: 2614 - RNA, 20 nt, synthetic construct
  source 1..20: mol_type = other RNA
agccctgaagcaccaagaac

SEQ ID NO: 2615 - RNA, 20 nt, synthetic construct
  source 1..20: mol_type = other RNA
cttccagaagtgcctggcac

SEQ ID NO: 2616 - RNA, 20 nt, synthetic construct
  source 1..20: mol_type = other RNA
ggatagctgcacagggaagg

SEQ ID NO: 2617 - RNA, 20 nt, synthetic construct
  source 1..20: mol_type = other RNA
cggatagctgcacagggaag

SEQ ID NO: 2618 - RNA, 20 nt, synthetic construct
  source 1..20: mol_type = other RNA
acggatagctgcacagggaa

SEQ ID NO: 2619 - RNA, 20 nt, synthetic construct
  source 1..20: mol_type = other RNA
aacactcaccgccgtgtggc

SEQ ID NO: 2620 - RNA, 20 nt, synthetic construct
  source 1..20: mol_type = other RNA
ctcacctccacacagaatga

SEQ ID NO: 2621 - RNA, 20 nt, synthetic construct
  source 1..20: mol_type = other RNA
gtggcaggcagagaaggggc

SEQ ID NO: 2622 - RNA, 20 nt, synthetic construct
  source 1..20: mol_type = other RNA
ggccggtctgtggggacaca

SEQ ID NO: 2623 - RNA, 20 nt, synthetic construct
  source 1..20: mol_type = other RNA
tggccggtctgtggggacac

SEQ ID NO: 2624 - RNA, 20 nt, synthetic construct
  source 1..20: mol_type = other RNA
cagcttggggaagaggtact

SEQ ID NO: 2625 - RNA, 20 nt, synthetic construct
  source 1..20: mol_type = other RNA
gcagcttggggaagaggtac

SEQ ID NO: 2626 - RNA, 20 nt, synthetic construct
  source 1..20: mol_type = other RNA
tctgctccaggagatctaca

SEQ ID NO: 2627 - RNA, 20 nt, synthetic construct
  source 1..20: mol_type = other RNA
ggtcatggccgccagaccct

SEQ ID NO: 2628 - RNA, 20 nt, synthetic construct
  source 1..20: mol_type = other RNA
gtccagtgtcccagaatgcc

SEQ ID NO: 2629 - RNA, 20 nt, synthetic construct
  source 1..20: mol_type = other RNA
aatcacctctgaacaatccc

SEQ ID NO: 2630 - RNA, 20 nt, synthetic construct
  source 1..20: mol_type = other RNA
cagcctggaagagaaaggaa

SEQ ID NO: 2631 - RNA, 20 nt, synthetic construct
  source 1..20: mol_type = other RNA
gcttacctcttcactgttgg

SEQ ID NO: 2632 - RNA, 20 nt, synthetic construct
  source 1..20: mol_type = other RNA
gaggcttacctcttcactgt

SEQ ID NO: 2633 - RNA, 20 nt, synthetic construct
  source 1..20: mol_type = other RNA
ttgtgctgaaataaagaaaa

SEQ ID NO: 2634 - RNA, 20 nt, synthetic construct
  source 1..20: mol_type = other RNA
tgtgctgaaataaagaaaaa

SEQ ID NO: 2635 - RNA, 20 nt, synthetic construct
  source 1..20: mol_type = other RNA
gtgctgaaataaagaaaaag

SEQ ID NO: 2636 - RNA, 20 nt, synthetic construct
  source 1..20: mol_type = other RNA
ctaccttcagattggagagc

SEQ ID NO: 2637 - RNA, 20 nt, synthetic construct
  source 1..20: mol_type = other RNA
ttgcaaagaaacatggggaa

SEQ ID NO: 2638 - RNA, 20 nt, synthetic construct
  source 1..20: mol_type = other RNA
tgaccgacattccatggcca

SEQ ID NO: 2639 - RNA, 20 nt, synthetic construct
  source 1..20: mol_type = other RNA
tttcactgaaagggagagag

SEQ ID NO: 2640 - RNA, 20 nt, synthetic construct
  source 1..20: mol_type = other RNA
ctttcactgaaagggagaga

SEQ ID NO: 2641 - RNA, 20 nt, synthetic construct
  source 1..20: mol_type = other RNA
tctttcactgaaagggagag

SEQ ID NO: 2642 - RNA, 20 nt, synthetic construct
  source 1..20: mol_type = other RNA
tgttctgtgggcagaggggt

SEQ ID NO: 2643 - RNA, 20 nt, synthetic construct
  source 1..20: mol_type = other RNA
gctgtgttctgtgggcagag

SEQ ID NO: 2644 - RNA, 20 nt, synthetic construct
  source 1..20: mol_type = other RNA
acctcaccttctgtttgtcg

SEQ ID NO: 2645 - RNA, 20 nt, synthetic construct
  source 1..20: mol_type = other RNA
ccacctgggaagggaaggag

SEQ ID NO: 2646 - RNA, 20 nt, synthetic construct
  source 1..20: mol_type = other RNA
accacctgggaagggaagga

SEQ ID NO: 2647 - RNA, 20 nt, synthetic construct
  source 1..20: mol_type = other RNA
caccacctgggaagggaagg

SEQ ID NO: 2648 - RNA, 20 nt, synthetic construct
  source 1..20: mol_type = other RNA
gtcctgtgggaagcagtggc

SEQ ID NO: 2649 - RNA, 20 nt, synthetic construct
  source 1..20: mol_type = other RNA
agttgtcctgtgggaagcag

SEQ ID NO: 2650 - RNA, 20 nt, synthetic construct
  source 1..20: mol_type = other RNA; mol_type = other RNA
ctcactgatggggacaaatg

SEQ ID NO: 2651 - RNA, 20 nt, synthetic construct
  source 1..20: mol_type = other RNA; mol_type = other RNA
gctcactgatggggacaaat

SEQ ID NO: 2652 - RNA, 20 nt, synthetic construct
  source 1..20: mol_type = other RNA; mol_type = other RNA
ggctcactgatggggacaaa

SEQ ID NO: 2653 - RNA, 20 nt, synthetic construct
  source 1..20: mol_type = other RNA; mol_type = other RNA
gcacctgaatgtagccctgc

SEQ ID NO: 2654 - RNA, 20 nt, synthetic construct
  source 1..20: mol_type = other RNA; mol_type = other RNA
tcacctgtgggcacaagaac

SEQ ID NO: 2655 - RNA, 20 nt, synthetic construct
  source 1..20: mol_type = other RNA; mol_type = other RNA
agccctggagcaagatgggg

SEQ ID NO: 2656 - RNA, 20 nt, synthetic construct
  source 1..20: mol_type = other RNA; mol_type = other RNA
tagccctggagcaagatggg

SEQ ID NO: 2657 - RNA, 20 nt, synthetic construct
  source 1..20: mol_type = other RNA; mol_type = other RNA
gtagccctggagcaagatgg

SEQ ID NO: 2658 - RNA, 20 nt, synthetic construct
  source 1..20: mol_type = other RNA; mol_type = other RNA
tgtagccctggagcaagatg

SEQ ID NO: 2659 - RNA, 20 nt, synthetic construct
  source 1..20: mol_type = other RNA; mol_type = other RNA
ttgtagccctggagcaagat

SEQ ID NO: 2660 - RNA, 20 nt, synthetic construct
  source 1..20: mol_type = other RNA; mol_type = other RNA
cacctggaggaaggggtaca

SEQ ID NO: 2661 - RNA, 20 nt, synthetic construct
  source 1..20: mol_type = other RNA; mol_type = other RNA
gcccaccttcctctggtaga

SEQ ID NO: 2662 - RNA, 20 nt, synthetic construct
  source 1..20: mol_type = other RNA; mol_type = other RNA
ggagcgggggggagaagcgg

SEQ ID NO: 2663 - RNA, 20 nt, synthetic construct
  source 1..20: mol_type = other RNA; mol_type = other RNA
aaacaaaaggagatatcaag

SEQ ID NO: 2664 - RNA, 20 nt, synthetic construct
  source 1..20: mol_type = other RNA; mol_type = other RNA
atatctgagtactttagtta

SEQ ID NO: 2665 - RNA, 20 nt, synthetic construct
  source 1..20: mol_type = other RNA; mol_type = other RNA
cctacctctgcaattaaatt

SEQ ID NO: 2666 - RNA, 20 nt, synthetic construct
  source 1..20: mol_type = other RNA; mol_type = other RNA
ataacttacctttttgtctc

SEQ ID NO: 2667 - RNA, 20 nt, synthetic construct
  source 1..20: mol_type = other RNA; mol_type = other RNA
tcgctggcagccgctgtact

SEQ ID NO: 2668 - RNA, 20 nt, synthetic construct
  source 1..20: mol_type = other RNA; mol_type = other RNA
actctaaaaagtgaaaatca

SEQ ID NO: 2669 - RNA, 20 nt, synthetic construct
  source 1..20: mol_type = other RNA; mol_type = other RNA
aggtgcagcagatgaaacag

SEQ ID NO: 2670 - RNA, 20 nt, synthetic construct
  source 1..20: mol_type = other RNA
accacctgggcggcccaggc

SEQ ID NO: 2671 - RNA, 20 nt, synthetic construct
  source 1..20: mol_type = other RNA
ccacctgggcggcccaggca

SEQ ID NO: 2672 - RNA, 20 nt, synthetic construct
  source 1..20: mol_type = other RNA
cccccaccctgcagggcacc

SEQ ID NO: 2673 - RNA, 20 nt, synthetic construct
  source 1..20: mol_type = other RNA
ccaccctgcagggcaccagg

SEQ ID NO: 2674 - RNA, 20 nt, synthetic construct
  source 1..20: mol_type = other RNA
agccctcacctctcactagt

SEQ ID NO: 2675 - RNA, 20 nt, synthetic construct
  source 1..20: mol_type = other RNA
cacctagagaaggcagcgtc

SEQ ID NO: 2676 - RNA, 20 nt, synthetic construct
  source 1..20: mol_type = other RNA
accctggggggagccaaatt

SEQ ID NO: 2677 - RNA, 20 nt, synthetic construct
  source 1..20: mol_type = other RNA
caaactctgagatgtgggtg

SEQ ID NO: 2678 - RNA, 20 nt, synthetic construct
  source 1..20: mol_type = other RNA
gcaaactctgagatgtgggt

SEQ ID NO: 2679 - RNA, 20 nt, synthetic construct
  source 1..20: mol_type = other RNA
tcaactgggagtgggcggag

SEQ ID NO: 2680 - RNA, 20 nt, synthetic construct
  source 1..20: mol_type = other RNA
actgctgaccttgatgtagt

SEQ ID NO: 2681 - RNA, 20 nt, synthetic construct
  source 1..20: mol_type = other RNA
gctggttctggacgcaagcg

SEQ ID NO: 2682 - RNA, 20 nt, synthetic construct
  source 1..20: mol_type = other RNA
ttgttctggaaagggagggt

SEQ ID NO: 2683 - RNA, 20 nt, synthetic construct
  source 1..20: mol_type = other RNA
tgttctggaaagggagggtc

SEQ ID NO: 2684 - RNA, 20 nt, synthetic construct
  source 1..20: mol_type = other RNA
gccactcacattgtccagcg

SEQ ID NO: 2685 - RNA, 20 nt, synthetic construct
  source 1..20: mol_type = other RNA
ctccctaagccgaggacata

SEQ ID NO: 2686 - RNA, 20 nt, synthetic construct
  source 1..20: mol_type = other RNA
tctccctaagccgaggacat

SEQ ID NO: 2687 - RNA, 20 nt, synthetic construct
  source 1..20: mol_type = other RNA
tcacctgcagtgcacgatga

SEQ ID NO: 2688 - RNA, 20 nt, synthetic construct
  source 1..20: mol_type = other RNA
ccggcgctggggaaagacgg

SEQ ID NO: 2689 - RNA, 20 nt, synthetic construct
  source 1..20: mol_type = other RNA; mol_type = other RNA
gccggcgctggggaaagacg

SEQ ID NO: 2690 - RNA, 20 nt, synthetic construct
  source 1..20: mol_type = other RNA; mol_type = other RNA
tgccggcgctggggaaagac

SEQ ID NO: 2691 - RNA, 20 nt, synthetic construct
  source 1..20: mol_type = other RNA; mol_type = other RNA
cactcacttggacgaggtgc

SEQ ID NO: 2692 - RNA, 20 nt, synthetic construct
  source 1..20: mol_type = other RNA; mol_type = other RNA
ccactcacttggacgaggtg

SEQ ID NO: 2693 - RNA, 20 nt, synthetic construct
  source 1..20: mol_type = other RNA; mol_type = other RNA
tgtctgcagccgggtgcagg

SEQ ID NO: 2694 - RNA, 20 nt, synthetic construct
  source 1..20: mol_type = other RNA; mol_type = other RNA
gtgtctgcagccgggtgcag

SEQ ID NO: 2695 - RNA, 20 nt, synthetic construct
  source 1..20: mol_type = other RNA; mol_type = other RNA
tgtgtctgcagccgggtgca

SEQ ID NO: 2696 - RNA, 20 nt, synthetic construct
  source 1..20: mol_type = other RNA; mol_type = other RNA
caccgctcacttcctcttga

SEQ ID NO: 2697 - RNA, 20 nt, synthetic construct
  source 1..20: mol_type = other RNA; mol_type = other RNA
gcaccgctcacttcctcttg

SEQ ID NO: 2698 - RNA, 20 nt, synthetic construct
  source 1..20: mol_type = other RNA; mol_type = other RNA
tttcttctaaaatagtccat

SEQ ID NO: 2699 - RNA, 20 nt, synthetic construct
  source 1..20: mol_type = other RNA; mol_type = other RNA
gttactgacctttcagaggt

SEQ ID NO: 2700 - RNA, 20 nt, synthetic construct
  source 1..20: mol_type = other RNA; mol_type = other RNA
actacttactctgcacaggg

SEQ ID NO: 2701 - RNA, 20 nt, synthetic construct
  source 1..20: mol_type = other RNA
gacctaaaatataaaaaatt

SEQ ID NO: 2702 - RNA, 20 nt, synthetic construct
  source 1..20: mol_type = other RNA
atttacctgaacctctgaat

SEQ ID NO: 2703 - RNA, 20 nt, synthetic construct
  source 1..20: mol_type = other RNA
cttactgtacaacaagctgc

SEQ ID NO: 2704 - RNA, 20 nt, synthetic construct
  source 1..20: mol_type = other RNA
cgatcctgaaaattgaaaac

SEQ ID NO: 2705 - RNA, 20 nt, synthetic construct
  source 1..20: mol_type = other RNA
cccttaccaggcttgatgag

SEQ ID NO: 2706 - RNA, 20 nt, synthetic construct
  source 1..20: mol_type = other RNA
gatattggctaaatacagaa

SEQ ID NO: 2707 - RNA, 20 nt, synthetic construct
  source 1..20: mol_type = other RNA
ttctgtacctcatcaagaat

SEQ ID NO: 2708 - RNA, 20 nt, synthetic construct
  source 1..20: mol_type = other RNA; mol_type = other RNA
ttctcctgcaggatttaaaa

SEQ ID NO: 2709 - RNA, 20 nt, synthetic construct
  source 1..20: mol_type = other RNA
ggtcatctgcaggaaaaaaa

SEQ ID NO: 2710 - RNA, 20 nt, synthetic construct
  source 1..20: mol_type = other RNA
caagaactaaatggggaaat

SEQ ID NO: 2711 - RNA, 20 nt, synthetic construct
  source 1..20: mol_type = other RNA
ggcgagcctgagggcggggc

SEQ ID NO: 2712 - RNA, 20 nt, synthetic construct
  source 1..20: mol_type = other RNA
tggcgagcctgagggcgggg

SEQ ID NO: 2713 - RNA, 20 nt, synthetic construct
  source 1..20: mol_type = other RNA
cctcgcctgtcacgtgcagc

SEQ ID NO: 2714 - RNA, 20 nt, synthetic construct
  source 1..20: mol_type = other RNA
gcgcgccagatggccgtcag

SEQ ID NO: 2715 - RNA, 20 nt, synthetic construct
  source 1..20: mol_type = other RNA
tgcatggaccagcgctgcgc

SEQ ID NO: 2716 - RNA, 20 nt, synthetic construct
  source 1..20: mol_type = other RNA
gtccatgcaggtgccacccg

SEQ ID NO: 2717 - RNA, 20 nt, synthetic construct
  source 1..20: mol_type = other RNA
agcgcagcgctggtccatgc

SEQ ID NO: 2718 - RNA, 20 nt, synthetic construct
  source 1..20: mol_type = other RNA
cgcacccacctgggcggcgg

SEQ ID NO: 2719 - RNA, 20 nt, synthetic construct
  source 1..20: mol_type = other RNA
cgcggctgcaggggagaagg

SEQ ID NO: 2720 - RNA, 20 nt, synthetic construct
  source 1..20: mol_type = other RNA
gcacccacctgggcggcggc

SEQ ID NO: 2721 - RNA, 20 nt, synthetic construct
  source 1..20: mol_type = other RNA
cggcgcggctgcaggggaga

SEQ ID NO: 2722 - RNA, 20 nt, synthetic construct
  source 1..20: mol_type = other RNA
gcggctgcaggggagaaggc

SEQ ID NO: 2723 - RNA, 20 nt, synthetic construct
  source 1..20: mol_type = other RNA
gggccggaccaggcgagggc

SEQ ID NO: 2724 - RNA, 20 nt, synthetic construct
  source 1..20: mol_type = other RNA
ccggaccaggcgagggcggg

SEQ ID NO: 2725 - RNA, 20 nt, synthetic construct
  source 1..20: mol_type = other RNA
atttgagccagatgaacccc

SEQ ID NO: 2726 - RNA, 20 nt, synthetic construct
  source 1..20: mol_type = other RNA
ttaccctccgggttgggcag

SEQ ID NO: 2727 - RNA, 20 nt, synthetic construct
  source 1..20: mol_type = other RNA
cttaccctccgggttgggca

SEQ ID NO: 2728 - RNA, 20 nt, synthetic construct
  source 1..20: mol_type = other RNA
gtcctggggaaacaaaggca

SEQ ID NO: 2729 - RNA, 20 nt, synthetic construct
  source 1..20: mol_type = other RNA
atccagtcctggggaaacaa

SEQ ID NO: 2730 - RNA, 20 nt, synthetic construct
  source 1..20: mol_type = other RNA
tactcacccatggtaaactc

SEQ ID NO: 2731 - RNA, 20 nt, synthetic construct
  source 1..20: mol_type = other RNA; mol_type = other RNA
taaaaccctgcaggaggtgg

SEQ ID NO: 2732 - RNA, 20 nt, synthetic construct
  source 1..20: mol_type = other RNA; mol_type = other RNA
agtctgtgggccagaagaaa

SEQ ID NO: 2733 - RNA, 20 nt, synthetic construct
  source 1..20: mol_type = other RNA; mol_type = other RNA
actcacctgtgagctgccaa

SEQ ID NO: 2734 - RNA, 20 nt, synthetic construct
  source 1..20: mol_type = other RNA; mol_type = other RNA
gctgccaaaggatatagatg

SEQ ID NO: 2735 - RNA, 20 nt, synthetic construct
  source 1..20: mol_type = other RNA; mol_type = other RNA
ctgccaaaggatatagatga

SEQ ID NO: 2736 - RNA, 20 nt, synthetic construct
  source 1..20: mol_type = other RNA; mol_type = other RNA
gtcaccttcacagagcttcc

SEQ ID NO: 2737 - RNA, 20 nt, synthetic construct
  source 1..20: mol_type = other RNA; mol_type = other RNA
cagcaccttcagagaatggg

SEQ ID NO: 2738 - RNA, 20 nt, synthetic construct
  source 1..20: mol_type = other RNA; mol_type = other RNA
caccttcagagaatgggtgg

SEQ ID NO: 2739 - RNA, 20 nt, synthetic construct
  source 1..20: mol_type = other RNA; mol_type = other RNA
atgtactctaaaagcaagtt

SEQ ID NO: 2740 - RNA, 20 nt, synthetic construct
  source 1..20: mol_type = other RNA; mol_type = other RNA
aatgtactctaaaagcaagt

SEQ ID NO: 2741 - RNA, 20 nt, synthetic construct
  source 1..20: mol_type = other RNA; mol_type = other RNA
cgctgcgccagcgccgcgtg

SEQ ID NO: 2742 - RNA, 20 nt, synthetic construct
  source 1..20: mol_type = other RNA; mol_type = other RNA
gggcccccagtagaatccgc

SEQ ID NO: 2743 - RNA, 20 nt, synthetic construct
  source 1..20: mol_type = other RNA; mol_type = other RNA
cttacctacctcccaatgtc

SEQ ID NO: 2744 - RNA, 20 nt, synthetic construct
  source 1..20: mol_type = other RNA; mol_type = other RNA
ctgcatctacagtaatctga

SEQ ID NO: 2745 - RNA, 20 nt, synthetic construct
  source 1..20: mol_type = other RNA; mol_type = other RNA
atggtatcctaaaatagaaa

SEQ ID NO: 2746 - RNA, 20 nt, synthetic construct
  source 1..20: mol_type = other RNA; mol_type = other RNA
tcatacctgcaggagctgag

SEQ ID NO: 2747 - RNA, 20 nt, synthetic construct
  source 1..20: mol_type = other RNA; mol_type = other RNA
taagctagaagagaagtgga

SEQ ID NO: 2748 - RNA, 20 nt, synthetic construct
  source 1..20: mol_type = other RNA; mol_type = other RNA
ctcttaagctagaagagaag

SEQ ID NO: 2749 - RNA, 20 nt, synthetic construct
  source 1..20: mol_type = other RNA; mol_type = other RNA
gctgcagcctggatcaagcg

SEQ ID NO: 2750 - RNA, 20 nt, synthetic construct
  source 1..20: mol_type = other RNA; mol_type = other RNA
gctgcaggacctgtgccgcc

SEQ ID NO: 2751 - RNA, 20 nt, synthetic construct
  source 1..20: mol_type = other RNA; mol_type = other RNA
ttcctgttgggggtgggtag

SEQ ID NO: 2752 - RNA, 20 nt, synthetic construct
  source 1..20: mol_type = other RNA; mol_type = other RNA
gttcctgttgggggtgggta

SEQ ID NO: 2753 - RNA, 20 nt, synthetic construct
  source 1..20: mol_type = other RNA; mol_type = other RNA
tgttcctgttgggggtgggt

SEQ ID NO: 2754 - RNA, 20 nt, synthetic construct
  source 1..20: mol_type = other RNA; mol_type = other RNA
acaggaacaggaatattacc

SEQ ID NO: 2755 - RNA, 20 nt, synthetic construct
  source 1..20: mol_type = other RNA; mol_type = other RNA
gatatccacgccatttcacc

SEQ ID NO: 2756 - RNA, 20 nt, synthetic construct
  source 1..20: mol_type = other RNA; mol_type = other RNA
actcacgtgagcaccgggat

SEQ ID NO: 2757 - RNA, 20 nt, synthetic construct
  source 1..20: mol_type = other RNA; mol_type = other RNA
gactcacgtgagcaccggga

SEQ ID NO: 2758 - RNA, 20 nt, synthetic construct
  source 1..20: mol_type = other RNA; mol_type = other RNA
cacctgtgaggaaaaggacg

SEQ ID NO: 2759 - RNA, 20 nt, synthetic construct
  source 1..20: mol_type = other RNA; mol_type = other RNA
ccacctgtgaggaaaaggac

SEQ ID NO: 2760 - RNA, 20 nt, synthetic construct
  source 1..20: mol_type = other RNA; mol_type = other RNA
gactcactgagacaaagtag

SEQ ID NO: 2761 - RNA, 20 nt, synthetic construct
  source 1..20: mol_type = other RNA; mol_type = other RNA
accacctgtgaggaaaagga

SEQ ID NO: 2762 - RNA, 20 nt, synthetic construct
  source 1..20: mol_type = other RNA; mol_type = other RNA
ggactcactgagacaaagta

SEQ ID NO: 2763 - RNA, 20 nt, synthetic construct
  source 1..20: mol_type = other RNA; mol_type = other RNA
gggactcactgagacaaagt

SEQ ID NO: 2764 - RNA, 20 nt, synthetic construct
  source 1..20: mol_type = other RNA; mol_type = other RNA
ttacttggcaggctttccaa

SEQ ID NO: 2765 - RNA, 20 nt, synthetic construct
  source 1..20: mol_type = other RNA; mol_type = other RNA
cagtacctggggggagagaa

SEQ ID NO: 2766 - RNA, 20 nt, synthetic construct
  source 1..20: mol_type = other RNA; mol_type = other RNA
ccagtacctggggggagaga

SEQ ID NO: 2767 - RNA, 20 nt, synthetic construct
  source 1..20: mol_type = other RNA; mol_type = other RNA
ttgtgctggaggcaccagaa

SEQ ID NO: 2768 - RNA, 20 nt, synthetic construct
  source 1..20: mol_type = other RNA; mol_type = other RNA
attgtgctggaggcaccaga

SEQ ID NO: 2769 - RNA, 20 nt, synthetic construct
  source 1..20: mol_type = other RNA; mol_type = other RNA
cccaacgctgacagagagaa

SEQ ID NO: 2770 - RNA, 20 nt, synthetic construct
  source 1..20: mol_type = other RNA; mol_type = other RNA
gtcacctgaggacagaaagg

SEQ ID NO: 2771 - RNA, 20 nt, synthetic construct
  source 1..20: mol_type = other RNA; mol_type = other RNA
gccgtcacctgaggacagaa

SEQ ID NO: 2772 - RNA, 20 nt, synthetic construct
  source 1..20: mol_type = other RNA; mol_type = other RNA
ttccagttctaaggggagcg

SEQ ID NO: 2773 - RNA, 20 nt, synthetic construct
  source 1..20: mol_type = other RNA; mol_type = other RNA
tcacctgaaatgacaatgat

SEQ ID NO: 2774 - RNA, 20 nt, synthetic construct
  source 1..20: mol_type = other RNA; mol_type = other RNA
catccaacctgaagaccaaa

SEQ ID NO: 2775 - RNA, 20 nt, synthetic construct
  source 1..20: mol_type = other RNA; mol_type = other RNA
gatctctgagtggaaagaac

SEQ ID NO: 2776 - RNA, 20 nt, synthetic construct
  source 1..20: mol_type = other RNA; mol_type = other RNA
aggacgcgcatccccggggc

SEQ ID NO: 2777 - RNA, 20 nt, synthetic construct
  source 1..20: mol_type = other RNA; mol_type = other RNA
tcccacaggtaagcgggtga

SEQ ID NO: 2778 - RNA, 20 nt, synthetic construct
  source 1..20: mol_type = other RNA; mol_type = other RNA
ggcgctacgagccttcccac

SEQ ID NO: 2779 - RNA, 20 nt, synthetic construct
  source 1..20: mol_type = other RNA; mol_type = other RNA
cccactcacccatggggcag

SEQ ID NO: 2780 - RNA, 20 nt, synthetic construct
  source 1..20: mol_type = other RNA; mol_type = other RNA
cgacacagcagtgcccacag

SEQ ID NO: 2781 - RNA, 20 nt, synthetic construct
  source 1..20: mol_type = other RNA; mol_type = other RNA
gtcgtctaagggacacagac

SEQ ID NO: 2782 - RNA, 20 nt, synthetic construct
  source 1..20: mol_type = other RNA; mol_type = other RNA
tcgtctaagggacacagaca

SEQ ID NO: 2783 - RNA, 20 nt, synthetic construct
  source 1..20: mol_type = other RNA; mol_type = other RNA
cgtctaagggacacagacag

SEQ ID NO: 2784 - RNA, 20 nt, synthetic construct
  source 1..20: mol_type = other RNA; mol_type = other RNA
cccccaggccaagcccaccc

SEQ ID NO: 2785 - RNA, 20 nt, synthetic construct
  source 1..20: mol_type = other RNA; mol_type = other RNA
aaattacctggatctgaact

SEQ ID NO: 2786 - RNA, 20 nt, synthetic construct
  source 1..20: mol_type = other RNA; mol_type = other RNA
tcatctaagggacacagatg

SEQ ID NO: 2787 - RNA, 20 nt, synthetic construct
  source 1..20: mol_type = other RNA; mol_type = other RNA
gtgctgcggggagaagccca

SEQ ID NO: 2788 - RNA, 20 nt, synthetic construct
  source 1..20: mol_type = other RNA; mol_type = other RNA
accattacctgcatccagaa

SEQ ID NO: 2789 - RNA, 20 nt, synthetic construct
  source 1..20: mol_type = other RNA; mol_type = other RNA
ccattacctgcatccagaac

SEQ ID NO: 2790 - RNA, 20 nt, synthetic construct
  source 1..20: mol_type = other RNA; mol_type = other RNA
ccccactcagagcttgctgg

SEQ ID NO: 2791 - RNA, 20 nt, synthetic construct
  source 1..20: mol_type = other RNA; mol_type = other RNA
acccagaagagcactggccc

SEQ ID NO: 2792 - RNA, 20 nt, synthetic construct
  source 1..20: mol_type = other RNA; mol_type = other RNA
aggatcacccagaagagcac

SEQ ID NO: 2793 - RNA, 20 nt, synthetic construct
  source 1..20: mol_type = other RNA; mol_type = other RNA
tggagctctgaaacgacacc

SEQ ID NO: 2794 - RNA, 20 nt, synthetic construct
  source 1..20: mol_type = other RNA; mol_type = other RNA
agctctgaaacgacaccagg

SEQ ID NO: 2795 - RNA, 20 nt, synthetic construct
  source 1..20: mol_type = other RNA; mol_type = other RNA
ctcacccacaagctctagct

SEQ ID NO: 2796 - RNA, 20 nt, synthetic construct
  source 1..20: mol_type = other RNA; mol_type = other RNA
tcacccacaagctctagctt

SEQ ID NO: 2797 - RNA, 20 nt, synthetic construct
  source 1..20: mol_type = other RNA; mol_type = other RNA
acttaccgttgagctcctcc

SEQ ID NO: 2798 - RNA, 20 nt, synthetic construct
  source 1..20: mol_type = other RNA; mol_type = other RNA
cttaccgttgagctcctcct

SEQ ID NO: 2799 - RNA, 20 nt, synthetic construct
  source 1..20: mol_type = other RNA; mol_type = other RNA
agctgctgtgggacgggaat

SEQ ID NO: 2800 - RNA, 20 nt, synthetic construct
  source 1..20: mol_type = other RNA; mol_type = other RNA
cagctgctgtgggacgggaa

SEQ ID NO: 2801 - RNA, 20 nt, synthetic construct
  source 1..20: mol_type = other RNA; mol_type = other RNA
ctcctcagctgctgtgggac

SEQ ID NO: 2802 - RNA, 20 nt, synthetic construct
  source 1..20: mol_type = other RNA; mol_type = other RNA
gccgctgcaggatgccagcc

SEQ ID NO: 2803 - RNA, 20 nt, synthetic construct
  source 1..20: mol_type = other RNA; mol_type = other RNA
tgactcaccaatcttgttat

SEQ ID NO: 2804 - RNA, 20 nt, synthetic construct
  source 1..20: mol_type = other RNA; mol_type = other RNA
tctctgcaaggcaaaaggat

SEQ ID NO: 2805 - RNA, 20 nt, synthetic construct
  source 1..20: mol_type = other RNA; mol_type = other RNA
ttctctgcaaggcaaaagga

SEQ ID NO: 2806 - RNA, 20 nt, synthetic construct
  source 1..20: mol_type = other RNA; mol_type = other RNA
actcaccaacagcaggaccg

SEQ ID NO: 2807 - RNA, 20 nt, synthetic construct
  source 1..20: mol_type = other RNA; mol_type = other RNA
gagacctgtggggacaaagc

SEQ ID NO: 2808 - RNA, 20 nt, synthetic construct
  source 1..20: mol_type = other RNA; mol_type = other RNA
ctcaccctgtgcggcacttc

SEQ ID NO: 2809 - RNA, 20 nt, synthetic construct
  source 1..20: mol_type = other RNA; mol_type = other RNA
acacctgggtacacacacag

SEQ ID NO: 2810 - RNA, 20 nt, synthetic construct
  source 1..20: mol_type = other RNA; mol_type = other RNA
tgagctctggaaaaagacat

SEQ ID NO: 2811 - RNA, 20 nt, synthetic construct
  source 1..20: mol_type = other RNA; mol_type = other RNA
ccggttcctgtaacacatag

SEQ ID NO: 2812 - RNA, 20 nt, synthetic construct
  source 1..20: mol_type = other RNA; mol_type = other RNA
cggttcctgtaacacatagt

SEQ ID NO: 2813 - RNA, 20 nt, synthetic construct
  source 1..20: mol_type = other RNA; mol_type = other RNA
gttcaccttgttgcaatagt

SEQ ID NO: 2814 - RNA, 20 nt, synthetic construct
  source 1..20: mol_type = other RNA; mol_type = other RNA
ttcaccttgttgcaatagta

SEQ ID NO: 2815 - RNA, 20 nt, synthetic construct
  source 1..20: mol_type = other RNA; mol_type = other RNA
tcaccttgttgcaatagtag

SEQ ID NO: 2816 - RNA, 20 nt, synthetic construct
  source 1..20: mol_type = other RNA; mol_type = other RNA
tcacagctaagtgctcaact

SEQ ID NO: 2817 - RNA, 20 nt, synthetic construct
  source 1..20: mol_type = other RNA; mol_type = other RNA
tgatactcaggccgccatca

SEQ ID NO: 2818 - RNA, 20 nt, synthetic construct
  source 1..20: mol_type = other RNA; mol_type = other RNA
gatactcaggccgccatcaa

SEQ ID NO: 2819 - RNA, 20 nt, synthetic construct
  source 1..20: mol_type = other RNA; mol_type = other RNA
gagaagagcaaaaacaggta

SEQ ID NO: 2820 - RNA, 20 nt, synthetic construct
  source 1..20: mol_type = other RNA; mol_type = other RNA
agaagagcaaaaacaggtaa

SEQ ID NO: 2821 - RNA, 20 nt, synthetic construct
  source 1..20: mol_type = other RNA; mol_type = other RNA
cgttaccttggatacaaggc

SEQ ID NO: 2822 - RNA, 20 nt, synthetic construct
  source 1..20: mol_type = other RNA; mol_type = other RNA
tcaccatgcagcagcccctt

SEQ ID NO: 2823 - RNA, 20 nt, synthetic construct
  source 1..20: mol_type = other RNA; mol_type = other RNA
tgggaaccagctccccatgc

SEQ ID NO: 2824 - RNA, 20 nt, synthetic construct
  source 1..20: mol_type = other RNA; mol_type = other RNA
catgcagcaagtaagtgcaa

SEQ ID NO: 2825 - RNA, 20 nt, synthetic construct
  source 1..20: mol_type = other RNA; mol_type = other RNA
tgcacttacttgctgcatgg

SEQ ID NO: 2826 - RNA, 20 nt, synthetic construct
  source 1..20: mol_type = other RNA; mol_type = other RNA
gcacttacttgctgcatggt

SEQ ID NO: 2827 - RNA, 20 nt, synthetic construct
  source 1..20: mol_type = other RNA; mol_type = other RNA
agctgcacaagttgtcaccc

SEQ ID NO: 2828 - RNA, 20 nt, synthetic construct
  source 1..20: mol_type = other RNA; mol_type = other RNA
ctcccccacaaccggtggac

SEQ ID NO: 2829 - RNA, 20 nt, synthetic construct
  source 1..20: mol_type = other RNA; mol_type = other RNA
ttattccagtccaccggttg

SEQ ID NO: 2830 - RNA, 20 nt, synthetic construct
  source 1..20: mol_type = other RNA; mol_type = other RNA
tattccagtccaccggttgt

SEQ ID NO: 2831 - RNA, 20 nt, synthetic construct
  source 1..20: mol_type = other RNA; mol_type = other RNA
attccagtccaccggttgtg

SEQ ID NO: 2832 - RNA, 20 nt, synthetic construct
  source 1..20: mol_type = other RNA; mol_type = other RNA
ttccagtccaccggttgtgg

SEQ ID NO: 2833 - RNA, 20 nt, synthetic construct
  source 1..20: mol_type = other RNA; mol_type = other RNA
gtccatggcgggcgcggcgg

SEQ ID NO: 2834 - RNA, 20 nt, synthetic construct
  source 1..20: mol_type = other RNA; mol_type = other RNA
gacgtccatggcgggcgcgg

SEQ ID NO: 2835 - RNA, 20 nt, synthetic construct
  source 1..20: mol_type = other RNA; mol_type = other RNA
tatgcagcagactcgcacag

SEQ ID NO: 2836 - RNA, 20 nt, synthetic construct
  source 1..20: mol_type = other RNA; mol_type = other RNA
tttccgcagaaggtaagcag

SEQ ID NO: 2837 - RNA, 20 nt, synthetic construct
  source 1..20: mol_type = other RNA; mol_type = other RNA
tcaaactagaatagagagag

SEQ ID NO: 2838 - RNA, 20 nt, synthetic construct
  source 1..20: mol_type = other RNA; mol_type = other RNA
caaactagaatagagagaga

SEQ ID NO: 2839 - RNA, 20 nt, synthetic construct
  source 1..20: mol_type = other RNA; mol_type = other RNA
cacccacctggctggttgac

SEQ ID NO: 2840 - RNA, 20 nt, synthetic construct
  source 1..20: mol_type = other RNA; mol_type = other RNA
tggatctaagagaggaggac

SEQ ID NO: 2841 - RNA, 20 nt, synthetic construct
  source 1..20: mol_type = other RNA; mol_type = other RNA
gatccaggagatggtccact

SEQ ID NO: 2842 - RNA, 20 nt, synthetic construct
  source 1..20: mol_type = other RNA; mol_type = other RNA
gtcccagctcatctcgcaga

SEQ ID NO: 2843 - RNA, 20 nt, synthetic construct
  source 1..20: mol_type = other RNA; mol_type = other RNA
tcatctcgcagatgggcatc

SEQ ID NO: 2844 - RNA, 20 nt, synthetic construct
  source 1..20: mol_type = other RNA; mol_type = other RNA
ctccactcaggaagaggagt

SEQ ID NO: 2845 - RNA, 20 nt, synthetic construct
  source 1..20: mol_type = other RNA; mol_type = other RNA
tgagccgcagaagcctgtgt

SEQ ID NO: 2846 - RNA, 20 nt, synthetic construct
  source 1..20: mol_type = other RNA; mol_type = other RNA
agacactcaggccgccatca

SEQ ID NO: 2847 - RNA, 20 nt, synthetic construct
  source 1..20: mol_type = other RNA; mol_type = other RNA
gacactcaggccgccatcaa

SEQ ID NO: 2848 - RNA, 20 nt, synthetic construct
  source 1..20: mol_type = other RNA; mol_type = other RNA
gacctgcaggccttccgcag

SEQ ID NO: 2849 - RNA, 20 nt, synthetic construct
  source 1..20: mol_type = other RNA; mol_type = other RNA
acctgcaggccttccgcagt

SEQ ID NO: 2850 - RNA, 20 nt, synthetic construct
  source 1..20: mol_type = other RNA; mol_type = other RNA
cctgcaggccttccgcagtg

SEQ ID NO: 2851 - RNA, 20 nt, synthetic construct
  source 1..20: mol_type = other RNA; mol_type = other RNA
ctgcttacctgtggccctgg

SEQ ID NO: 2852 - RNA, 20 nt, synthetic construct
  source 1..20: mol_type = other RNA; mol_type = other RNA
ggaagtcctacagagtggga

SEQ ID NO: 2853 - RNA, 20 nt, synthetic construct
  source 1..20: mol_type = other RNA; mol_type = other RNA
agtcctacagagtgggaagg

SEQ ID NO: 2854 - RNA, 20 nt, synthetic construct
  source 1..20: mol_type = other RNA; mol_type = other RNA
gtcccagtccccgctgctgg

SEQ ID NO: 2855 - RNA, 20 nt, synthetic construct
  source 1..20: mol_type = other RNA; mol_type = other RNA
tcccagtccccgctgctggt

SEQ ID NO: 2856 - RNA, 20 nt, synthetic construct
  source 1..20: mol_type = other RNA; mol_type = other RNA
gctgtcccagtccccgctgc

SEQ ID NO: 2857 - RNA, 20 nt, synthetic construct
  source 1..20: mol_type = other RNA; mol_type = other RNA
caggctgtgagagagaggag

SEQ ID NO: 2858 - RNA, 20 nt, synthetic construct
  source 1..20: mol_type = other RNA; mol_type = other RNA
gcaggctgtgagagagagga

SEQ ID NO: 2859 - RNA, 20 nt, synthetic construct
  source 1..20: mol_type = other RNA; mol_type = other RNA
agcaggctgtgagagagagg

SEQ ID NO: 2860 - RNA, 20 nt, synthetic construct
  source 1..20: mol_type = other RNA; mol_type = other RNA
tgccatctcttcctgccctt

SEQ ID NO: 2861 - RNA, 20 nt, synthetic construct
  source 1..20: mol_type = other RNA; mol_type = other RNA
gtactcacgcggtgtgcacc

SEQ ID NO: 2862 - RNA, 20 nt, synthetic construct
  source 1..20: mol_type = other RNA; mol_type = other RNA
ggaagtgcctgggtgaggac

SEQ ID NO: 2863 - RNA, 20 nt, synthetic construct
  source 1..20: mol_type = other RNA; mol_type = other RNA
agggtctagaaaagaggcaa

SEQ ID NO: 2864 - RNA, 20 nt, synthetic construct
  source 1..20: mol_type = other RNA; mol_type = other RNA
gggtctagaaaagaggcaaa

SEQ ID NO: 2865 - RNA, 20 nt, synthetic construct
  source 1..20: mol_type = other RNA; mol_type = other RNA
ggtctagaaaagaggcaaag

SEQ ID NO: 2866 - RNA, 20 nt, synthetic construct
  source 1..20: mol_type = other RNA; mol_type = other RNA
ggtagcctggggggtggggc

SEQ ID NO: 2867 - RNA, 20 nt, synthetic construct
  source 1..20: mol_type = other RNA; mol_type = other RNA
cccctggaaaatagtgaaaa

SEQ ID NO: 2868 - RNA, 20 nt, synthetic construct
  source 1..20: mol_type = other RNA; mol_type = other RNA
ctgaccttccaggatgagtt

SEQ ID NO: 2869 - RNA, 20 nt, synthetic construct
  source 1..20: mol_type = other RNA; mol_type = other RNA
gaggttctcactgaccttcc

SEQ ID NO: 2870 - RNA, 20 nt, synthetic construct
  source 1..20: mol_type = other RNA; mol_type = other RNA
gcgggcctggaaggatgaga

SEQ ID NO: 2871 - RNA, 20 nt, synthetic construct
  source 1..20: mol_type = other RNA; mol_type = other RNA
gcgtacctttctcacgagtt

SEQ ID NO: 2872 - RNA, 20 nt, synthetic construct
  source 1..20: mol_type = other RNA; mol_type = other RNA
cgcgtacctttctcacgagt

SEQ ID NO: 2873 - RNA, 20 nt, synthetic construct
  source 1..20: mol_type = other RNA; mol_type = other RNA
ggcccgtacctcggtagctg

SEQ ID NO: 2874 - RNA, 20 nt, synthetic construct
  source 1..20: mol_type = other RNA; mol_type = other RNA
gtcccagttctccgccctcc

SEQ ID NO: 2875 - RNA, 20 nt, synthetic construct
  source 1..20: mol_type = other RNA; mol_type = other RNA
ggaacaagccagggtcatgt

SEQ ID NO: 2876 - RNA, 20 nt, synthetic construct
  source 1..20: mol_type = other RNA; mol_type = other RNA
caacccctccatctcccagc

SEQ ID NO: 2877 - RNA, 20 nt, synthetic construct
  source 1..20: mol_type = other RNA; mol_type = other RNA
tgacctatcgggacaagcaa

SEQ ID NO: 2878 - RNA, 20 nt, synthetic construct
  source 1..20: mol_type = other RNA; mol_type = other RNA
agtacctggcagtgtgatat

SEQ ID NO: 2879 - RNA, 20 nt, synthetic construct
  source 1..20: mol_type = other RNA; mol_type = other RNA
atgtgcagaaagacctggag

SEQ ID NO: 2880 - RNA, 20 nt, synthetic construct
  source 1..20: mol_type = other RNA; mol_type = other RNA
gggcagcccgcctccgccgc

SEQ ID NO: 2881 - RNA, 20 nt, synthetic construct
  source 1..20: mol_type = other RNA; mol_type = other RNA
cctacctgtcaccaggacca

SEQ ID NO: 2882 - RNA, 20 nt, synthetic construct
  source 1..20: mol_type = other RNA; mol_type = other RNA
ctcttacctgtaccataacc

SEQ ID NO: 2883 - RNA, 20 nt, synthetic construct
  source 1..20: mol_type = other RNA; mol_type = other RNA
actcacgctggatagcctcc

SEQ ID NO: 2884 - RNA, 20 nt, synthetic construct
  source 1..20: mol_type = other RNA; mol_type = other RNA
cactcaccttagcctgagca

SEQ ID NO: 2885 - RNA, 20 nt, synthetic construct
  source 1..20: mol_type = other RNA; mol_type = other RNA
cttaccccacttaactatct

SEQ ID NO: 2886 - RNA, 20 nt, synthetic construct
  source 1..20: mol_type = other RNA; mol_type = other RNA
ccctacctgtcaccaggacc

SEQ ID NO: 2887 - RNA, 20 nt, synthetic construct
  source 1..20: mol_type = other RNA; mol_type = other RNA
attatacctgccatgccgta

SEQ ID NO: 2888 - RNA, 21 nt, synthetic construct
  source 1..21: mol_type = other RNA; mol_type = other RNA
gcagagcactggaattcgtca

SEQ ID NO: 2889 - RNA, 20 nt, synthetic construct
  source 1..20: mol_type = other RNA; mol_type = other RNA
tcgatctatgaaaaagacag

SEQ ID NO: 2890 - RNA, 20 nt, synthetic construct
  source 1..20: mol_type = other RNA; mol_type = other RNA
ccttacctagggacgcagcc

SEQ ID NO: 2891 - RNA, 20 nt, synthetic construct
  source 1..20: mol_type = other RNA; mol_type = other RNA
ggatccccagcgccagctgc

SEQ ID NO: 2892 - RNA, 20 nt, synthetic construct
  source 1..20: mol_type = other RNA; mol_type = other RNA
agcgccagctgccggcctcc

SEQ ID NO: 2893 - RNA, 20 nt, synthetic construct
  source 1..20: mol_type = other RNA; mol_type = other RNA
gcgccagctgccggcctcca

SEQ ID NO: 2894 - RNA, 20 nt, synthetic construct
  source 1..20: mol_type = other RNA; mol_type = other RNA
cctggctcagcgccacgggc

SEQ ID NO: 2895 - RNA, 20 nt, synthetic construct
  source 1..20: mol_type = other RNA; mol_type = other RNA
gctgcaggtgcagacaggtg

SEQ ID NO: 2896 - RNA, 20 nt, synthetic construct
  source 1..20: mol_type = other RNA; mol_type = other RNA
gcggtaccacgtcttgtaga

SEQ ID NO: 2897 - RNA, 20 nt, synthetic construct
  source 1..20: mol_type = other RNA; mol_type = other RNA
tgcctgtgggaacaaacaga

SEQ ID NO: 2898 - RNA, 20 nt, synthetic construct
  source 1..20: mol_type = other RNA; mol_type = other RNA
cttactttcactatcctggg

SEQ ID NO: 2899 - RNA, 20 nt, synthetic construct
  source 1..20: mol_type = other RNA; mol_type = other RNA
tcccttactttcactatcct

SEQ ID NO: 2900 - RNA, 20 nt, synthetic construct
  source 1..20: mol_type = other RNA; mol_type = other RNA
ctcccaggatagtgaaagta

SEQ ID NO: 2901 - RNA, 20 nt, synthetic construct
  source 1..20: mol_type = other RNA; mol_type = other RNA
tgatgtctgaaagggcagag

SEQ ID NO: 2902 - RNA, 20 nt, synthetic construct
  source 1..20: mol_type = other RNA; mol_type = other RNA
tgcccaggagctggtgcgga

SEQ ID NO: 2903 - RNA, 20 nt, synthetic construct
  source 1..20: mol_type = other RNA; mol_type = other RNA
ttgctgccacagaaccagaa

SEQ ID NO: 2904 - RNA, 20 nt, synthetic construct
  source 1..20: mol_type = other RNA; mol_type = other RNA
attcaagggattgaaaaccc

SEQ ID NO: 2905 - RNA, 20 nt, synthetic construct
  source 1..20: mol_type = other RNA; mol_type = other RNA
acctgcccaggggatacccg

SEQ ID NO: 2906 - RNA, 20 nt, synthetic construct
  source 1..20: mol_type = other RNA; mol_type = other RNA
cagcggcagccttctgagtc

SEQ ID NO: 2907 - RNA, 20 nt, synthetic construct
  source 1..20: mol_type = other RNA; mol_type = other RNA
gctacaaacaagctcatctt

SEQ ID NO: 2908 - RNA, 20 nt, synthetic construct
  source 1..20: mol_type = other RNA; mol_type = other RNA
ccagccaagtacgtaagtag

SEQ ID NO: 2909 - RNA, 20 nt, synthetic construct
  source 1..20: mol_type = other RNA; mol_type = other RNA
ctggatatctgtgggacaag

SEQ ID NO: 2910 - RNA, 20 nt, synthetic construct
  source 1..20: mol_type = other RNA; mol_type = other RNA
ggaccctgcatagagagaga

SEQ ID NO: 2911 - RNA, 20 nt, synthetic construct
  source 1..20: mol_type = other RNA; mol_type = other RNA
tgccccagcagacgggcacg

SEQ ID NO: 2912 - RNA, 20 nt, synthetic construct
  source 1..20: mol_type = other RNA; mol_type = other RNA
gttacctgggccatgtcccc

SEQ ID NO: 2913 - RNA, 20 nt, synthetic construct
  source 1..20: mol_type = other RNA; mol_type = other RNA
cttactgttagatttatatc

SEQ ID NO: 2914 - RNA, 20 nt, synthetic construct
  source 1..20: mol_type = other RNA; mol_type = other RNA
ttactgttagatttatatca

SEQ ID NO: 2915 - RNA, 20 nt, synthetic construct
  source 1..20: mol_type = other RNA; mol_type = other RNA
tttgctatggaaacacaaac

SEQ ID NO: 2916 - RNA, 20 nt, synthetic construct
  source 1..20: mol_type = other RNA; mol_type = other RNA
tccatagcaaatatccacat

SEQ ID NO: 2917 - RNA, 20 nt, synthetic construct
  source 1..20: mol_type = other RNA; mol_type = other RNA
gcagcaaccctcacaacctt

SEQ ID NO: 2918 - RNA, 20 nt, synthetic construct
  source 1..20: mol_type = other RNA; mol_type = other RNA
cagcaaccctcacaaccttt

SEQ ID NO: 2919 - RNA, 20 nt, synthetic construct
  source 1..20: mol_type = other RNA; mol_type = other RNA
aggcaggctcccctcgcctc

SEQ ID NO: 2920 - RNA, 20 nt, synthetic construct
  source 1..20: mol_type = other RNA; mol_type = other RNA
ggagcagcaggaccagcttc

SEQ ID NO: 2921 - RNA, 20 nt, synthetic construct
  source 1..20: mol_type = other RNA; mol_type = other RNA
caggaatacctgagctttct

SEQ ID NO: 2922 - RNA, 20 nt, synthetic construct
  source 1..20: mol_type = other RNA; mol_type = other RNA
aggttccagattccattgct

SEQ ID NO: 2923 - RNA, 20 nt, synthetic construct
  source 1..20: mol_type = other RNA; mol_type = other RNA
ctgggcccaggggctgaggc

SEQ ID NO: 2924 - RNA, 20 nt, synthetic construct
  source 1..20: mol_type = other RNA; mol_type = other RNA
gatcgagtggccccaggtcc

SEQ ID NO: 2925 - RNA, 20 nt, synthetic construct
  source 1..20: mol_type = other RNA; mol_type = other RNA
tcacccgacttctgaacgtg

SEQ ID NO: 2926 - RNA, 20 nt, synthetic construct
  source 1..20: mol_type = other RNA; mol_type = other RNA
ttacctgcccactgttagcc

SEQ ID NO: 2927 - RNA, 20 nt, synthetic construct
  source 1..20: mol_type = other RNA; mol_type = other RNA
gaagccacaggaagtctgtg

SEQ ID NO: 2928 - RNA, 20 nt, synthetic construct
  source 1..20: mol_type = other RNA; mol_type = other RNA
actccagttcctgacggctg

SEQ ID NO: 2929 - RNA, 20 nt, synthetic construct
  source 1..20: mol_type = other RNA; mol_type = other RNA
acctacaggagtacctgacg

SEQ ID NO: 2930 - RNA, 20 nt, synthetic construct
  source 1..20: mol_type = other RNA; mol_type = other RNA
ttcccagagcaccagagcca

SEQ ID NO: 2931 - RNA, 20 nt, synthetic construct
  source 1..20: mol_type = other RNA; mol_type = other RNA
acgttcagaagtcgggtgag

SEQ ID NO: 2932 - RNA, 20 nt, synthetic construct
  source 1..20: mol_type = other RNA; mol_type = other RNA
ttcagagcagtttgagacag

SEQ ID NO: 2933 - RNA, 20 nt, synthetic construct
  source 1..20: mol_type = other RNA; mol_type = other RNA
cctgctgggaaacagacaac

SEQ ID NO: 2934 - RNA, 20 nt, synthetic construct
  source 1..20: mol_type = other RNA; mol_type = other RNA
cactcacagtctagggtggc

SEQ ID NO: 2935 - RNA, 20 nt, synthetic construct
  source 1..20: mol_type = other RNA; mol_type = other RNA
caaccggcagcgagggaacg

SEQ ID NO: 2936 - RNA, 20 nt, synthetic construct
  source 1..20: mol_type = other RNA; mol_type = other RNA
acagggctggggcaggacag

SEQ ID NO: 2937 - RNA, 20 nt, synthetic construct
  source 1..20: mol_type = other RNA; mol_type = other RNA
catccaccagctcgcagcac

SEQ ID NO: 2938 - RNA, 20 nt, synthetic construct
  source 1..20: mol_type = other RNA; mol_type = other RNA
atccaccagctcgcagcaca

SEQ ID NO: 2939 - RNA, 20 nt, synthetic construct
  source 1..20: mol_type = other RNA; mol_type = other RNA
tccaccagctcgcagcacag

SEQ ID NO: 2940 - RNA, 20 nt, synthetic construct
  source 1..20: mol_type = other RNA; mol_type = other RNA
ccaccagctcgcagcacagg

SEQ ID NO: 2941 - RNA, 20 nt, synthetic construct
  source 1..20: mol_type = other RNA; mol_type = other RNA
tgtcacctggcaggaggagg

SEQ ID NO: 2942 - RNA, 20 nt, synthetic construct
  source 1..20: mol_type = other RNA; mol_type = other RNA
gtcacctggcaggaggaggc

SEQ ID NO: 2943 - RNA, 20 nt, synthetic construct
  source 1..20: mol_type = other RNA; mol_type = other RNA
ggcaccctgcagggagaaga

SEQ ID NO: 2944 - RNA, 20 nt, synthetic construct
  source 1..20: mol_type = other RNA; mol_type = other RNA
gcaccctgcagggagaagaa

SEQ ID NO: 2945 - RNA, 20 nt, synthetic construct
  source 1..20: mol_type = other RNA; mol_type = other RNA
attctgtcgtgggtaggggc

SEQ ID NO: 2946 - RNA, 20 nt, synthetic construct
  source 1..20: mol_type = other RNA; mol_type = other RNA
ctccattctgtcgtgggtag

SEQ ID NO: 2947 - RNA, 20 nt, synthetic construct
  source 1..20: mol_type = other RNA; mol_type = other RNA
cctcgggctgcaaaggagag

SEQ ID NO: 2948 - RNA, 20 nt, synthetic construct
  source 1..20: mol_type = other RNA; mol_type = other RNA
cgggctgcaaaggagagggg

SEQ ID NO: 2949 - RNA, 20 nt, synthetic construct
  source 1..20: mol_type = other RNA; mol_type = other RNA
gctgacctttccggtatccc

SEQ ID NO: 2950 - RNA, 20 nt, synthetic construct
  source 1..20: mol_type = other RNA; mol_type = other RNA
ctgacctttccggtatccca

SEQ ID NO: 2951 - RNA, 20 nt, synthetic construct
  source 1..20: mol_type = other RNA; mol_type = other RNA
tgttgcactgagatggggca

SEQ ID NO: 2952 - RNA, 20 nt, synthetic construct
  source 1..20: mol_type = other RNA; mol_type = other RNA
ctgttgcactgagatggggc

SEQ ID NO: 2953 - RNA, 20 nt, synthetic construct
  source 1..20: mol_type = other RNA; mol_type = other RNA
gccctgcagcccccagaacc

SEQ ID NO: 2954 - RNA, 20 nt, synthetic construct
  source 1..20: mol_type = other RNA; mol_type = other RNA
ctcacccgcagtgacacaca

SEQ ID NO: 2955 - RNA, 20 nt, synthetic construct
  source 1..20: mol_type = other RNA; mol_type = other RNA
gcagcacccagggcaggacc

SEQ ID NO: 2956 - RNA, 20 nt, synthetic construct
  source 1..20: mol_type = other RNA; mol_type = other RNA
cagcacccagggcaggacca

SEQ ID NO: 2957 - RNA, 20 nt, synthetic construct
  source 1..20: mol_type = other RNA; mol_type = other RNA
gtccctgtggaacagcagca

SEQ ID NO: 2958 - RNA, 20 nt, synthetic construct
  source 1..20: mol_type = other RNA; mol_type = other RNA
gtgggttcaagttcggatgg

SEQ ID NO: 2959 - RNA, 20 nt, synthetic construct
  source 1..20: mol_type = other RNA; mol_type = other RNA
gccccacctgggtctgagct

SEQ ID NO: 2960 - RNA, 20 nt, synthetic construct
  source 1..20: mol_type = other RNA; mol_type = other RNA
ggccccacctgggtctgagc

SEQ ID NO: 2961 - RNA, 20 nt, synthetic construct
  source 1..20: mol_type = other RNA; mol_type = other RNA
ccacctgggtctgagctggg

SEQ ID NO: 2962 - RNA, 20 nt, synthetic construct
  source 1..20: mol_type = other RNA; mol_type = other RNA
aggcctcccaggagccctca

SEQ ID NO: 2963 - RNA, 20 nt, synthetic construct
  source 1..20: mol_type = other RNA; mol_type = other RNA
ctcccaggagccctcaggga

SEQ ID NO: 2964 - RNA, 20 nt, synthetic construct
  source 1..20: mol_type = other RNA; mol_type = other RNA
cccccagctcacagtcacca

SEQ ID NO: 2965 - RNA, 20 nt, synthetic construct
  source 1..20: mol_type = other RNA; mol_type = other RNA
ggtctcaccggtgcttatgt

SEQ ID NO: 2966 - RNA, 20 nt, synthetic construct
  source 1..20: mol_type = other RNA; mol_type = other RNA
tgctgcgccgacataagcac

SEQ ID NO: 2967 - RNA, 20 nt, synthetic construct
  source 1..20: mol_type = other RNA; mol_type = other RNA
ggcagggctgggagagagca

SEQ ID NO: 2968 - RNA, 20 nt, synthetic construct
  source 1..20: mol_type = other RNA; mol_type = other RNA
cgagagcacgagcatgggtg

SEQ ID NO: 2969 - RNA, 20 nt, synthetic construct
  source 1..20: mol_type = other RNA; mol_type = other RNA
gagcacgagcatgggtgagg

SEQ ID NO: 2970 - RNA, 20 nt, synthetic construct
  source 1..20: mol_type = other RNA; mol_type = other RNA
agcacgagcatgggtgagga

SEQ ID NO: 2971 - RNA, 20 nt, synthetic construct
  source 1..20: mol_type = other RNA; mol_type = other RNA
gcacgagcatgggtgaggag

SEQ ID NO: 2972 - RNA, 20 nt, synthetic construct
  source 1..20: mol_type = other RNA; mol_type = other RNA
ctcacccatgctcgtgctct

SEQ ID NO: 2973 - RNA, 20 nt, synthetic construct
  source 1..20: mol_type = other RNA; mol_type = other RNA
ggtgcctgcgcgggggaagg

SEQ ID NO: 2974 - RNA, 20 nt, synthetic construct
  source 1..20: mol_type = other RNA; mol_type = other RNA
gtgcctgcgcgggggaagga

SEQ ID NO: 2975 - RNA, 20 nt, synthetic construct
  source 1..20: mol_type = other RNA; mol_type = other RNA
cttggtgcctgcgcggggga

SEQ ID NO: 2976 - RNA, 20 nt, synthetic construct
  source 1..20: mol_type = other RNA; mol_type = other RNA
ggccccagggccctgccgcc

SEQ ID NO: 2977 - RNA, 20 nt, synthetic construct
  source 1..20: mol_type = other RNA; mol_type = other RNA
tctacgctcaggcaggggag

SEQ ID NO: 2978 - RNA, 20 nt, synthetic construct
  source 1..20: mol_type = other RNA; mol_type = other RNA
ccaccaggacggccccccat

SEQ ID NO: 2979 - RNA, 20 nt, synthetic construct
  source 1..20: mol_type = other RNA; mol_type = other RNA
aggcccaggcggcagggccc

SEQ ID NO: 2980 - RNA, 20 nt, synthetic construct
  source 1..20: mol_type = other RNA; mol_type = other RNA
ggcccaggcggcagggccct

SEQ ID NO: 2981 - RNA, 20 nt, synthetic construct
  source 1..20: mol_type = other RNA; mol_type = other RNA
acgactggccagggcgcctg

SEQ ID NO: 2982 - RNA, 20 nt, synthetic construct
  source 1..20: mol_type = other RNA; mol_type = other RNA
caccgcccagacgactggcc

SEQ ID NO: 2983 - RNA, 20 nt, synthetic construct
  source 1..20: mol_type = other RNA; mol_type = other RNA
ctacaactgggctggcggcc

SEQ ID NO: 2984 - RNA, 20 nt, synthetic construct
  source 1..20: mol_type = other RNA; mol_type = other RNA
cagcaaccagacggacaagc

SEQ ID NO: 2985 - RNA, 20 nt, synthetic construct
  source 1..20: mol_type = other RNA; mol_type = other RNA
gtgtcacacaactgcccaac

SEQ ID NO: 2986 - RNA, 20 nt, synthetic construct
  source 1..20: mol_type = other RNA; mol_type = other RNA
agccggccagttccaaaccc

SEQ ID NO: 2987 - RNA, 20 nt, synthetic construct
  source 1..20: mol_type = other RNA; mol_type = other RNA
cggccagttccaaaccctgg

SEQ ID NO: 2988 - RNA, 20 nt, synthetic construct
  source 1..20: mol_type = other RNA; mol_type = other RNA
tccctgcagagaaacacact

SEQ ID NO: 2989 - RNA, 20 nt, synthetic construct
  source 1..20: mol_type = other RNA; mol_type = other RNA
gagactcaccaggggctggc

SEQ ID NO: 2990 - RNA, 20 nt, synthetic construct
  source 1..20: mol_type = other RNA; mol_type = other RNA
cctccttctttgaggagaaa

SEQ ID NO: 2991 - RNA, 20 nt, synthetic construct
  source 1..20: mol_type = other RNA; mol_type = other RNA
ccagtggcgagagaagaccc

SEQ ID NO: 2992 - RNA, 20 nt, synthetic construct
  source 1..20: mol_type = other RNA; mol_type = other RNA
tgcccagccactgaggcctg

SEQ ID NO: 2993 - RNA, 20 nt, synthetic construct
  source 1..20: mol_type = other RNA; mol_type = other RNA
cgactggccagggcgcctgt

SEQ ID NO: 2994 - RNA, 20 nt, synthetic construct
  source 1..20: mol_type = other RNA; mol_type = other RNA
accgcccagacgactggcca

SEQ ID NO: 2995 - RNA, 20 nt, synthetic construct
  source 1..20: mol_type = other RNA; mol_type = other RNA
tatccaaggactgagggcca

SEQ ID NO: 2996 - RNA, 20 nt, synthetic construct
  source 1..20: mol_type = other RNA; mol_type = other RNA
ggcgtctcaaacaggtatct

SEQ ID NO: 2997 - RNA, 20 nt, synthetic construct
  source 1..20: mol_type = other RNA; mol_type = other RNA
caaagcctgaagagaaatcc

SEQ ID NO: 2998 - RNA, 20 nt, synthetic construct
  source 1..20: mol_type = other RNA; mol_type = other RNA
agagcctgaaggagaagtct

SEQ ID NO: 2999 - RNA, 20 nt, synthetic construct
  source 1..20: mol_type = other RNA; mol_type = other RNA
tcccagtaccgggaaggcga

SEQ ID NO: 3000 - RNA, 20 nt, synthetic construct
  source 1..20: mol_type = other RNA; mol_type = other RNA
ggttcctgtggagcacaggg

SEQ ID NO: 3001 - RNA, 20 nt, synthetic construct
  source 1..20: mol_type = other RNA; mol_type = other RNA
tggggttcctgtggagcaca

SEQ ID NO: 3002 - RNA, 20 nt, synthetic construct
  source 1..20: mol_type = other RNA; mol_type = other RNA
tcatttcctagatgggagac

SEQ ID NO: 3003 - RNA, 20 nt, synthetic construct
  source 1..20: mol_type = other RNA; mol_type = other RNA
ttcctagatgggagacaggc

SEQ ID NO: 3004 - RNA, 20 nt, synthetic construct
  source 1..20: mol_type = other RNA; mol_type = other RNA
ccaggtgtctgaggaggaag

SEQ ID NO: 3005 - RNA, 20 nt, synthetic construct
  source 1..20: mol_type = other RNA; mol_type = other RNA
gtgtctgaggaggaagggga

SEQ ID NO: 3006 - RNA, 20 nt, synthetic construct
  source 1..20: mol_type = other RNA; mol_type = other RNA
tagtcctgggtggggtaggg

SEQ ID NO: 3007 - RNA, 20 nt, synthetic construct
  source 1..20: mol_type = other RNA; mol_type = other RNA
agtcctgggtggggtagggt

SEQ ID NO: 3008 - RNA, 20 nt, synthetic construct
  source 1..20: mol_type = other RNA; mol_type = other RNA
cattacctcatagtaggcaa

SEQ ID NO: 3009 - RNA, 20 nt, synthetic construct
  source 1..20: mol_type = other RNA; mol_type = other RNA
ccattacctcatagtaggca

SEQ ID NO: 3010 - RNA, 20 nt, synthetic construct
  source 1..20: mol_type = other RNA
acagatctgagcagataaca

SEQ ID NO: 3011 - RNA, 20 nt, synthetic construct
  source 1..20: mol_type = other RNA
tcctacccactggttgccct

SEQ ID NO: 3012 - RNA, 20 nt, synthetic construct
  source 1..20: mol_type = other RNA; mol_type = other RNA
aggtgcagtacctgaaggac

SEQ ID NO: 3013 - RNA, 20 nt, synthetic construct
  source 1..20: mol_type = other RNA; mol_type = other RNA
caggcagctggcgggcgcca

SEQ ID NO: 3014 - RNA, 20 nt, synthetic construct
  source 1..20: mol_type = other RNA; mol_type = other RNA
gacttccagggctccttctg

SEQ ID NO: 3015 - RNA, 20 nt, synthetic construct
  source 1..20: mol_type = other RNA; mol_type = other RNA
catccagatacattttgtca

SEQ ID NO: 3016 - RNA, 20 nt, synthetic construct
  source 1..20: mol_type = other RNA; mol_type = other RNA
acctgccaaacacagacagt

SEQ ID NO: 3017 - RNA, 20 nt, synthetic construct
  source 1..20: mol_type = other RNA; mol_type = other RNA
cgtgcagatgcaatggtcca

SEQ ID NO: 3018 - RNA, 20 nt, synthetic construct
  source 1..20: mol_type = other RNA; mol_type = other RNA
tgtaactgtaacaaaacata

SEQ ID NO: 3019 - RNA, 20 nt, synthetic construct
  source 1..20: mol_type = other RNA; mol_type = other RNA
acttaccaccgaccatgcat

SEQ ID NO: 3020 - RNA, 20 nt, synthetic construct
  source 1..20: mol_type = other RNA; mol_type = other RNA
cttaccaaaaaccttgactg

SEQ ID NO: 3021 - RNA, 20 nt, synthetic construct
  source 1..20: mol_type = other RNA; mol_type = other RNA
ccagtccaaatcttcgatga

SEQ ID NO: 3022 - RNA, 20 nt, synthetic construct
  source 1..20: mol_type = other RNA; mol_type = other RNA
cagtccaaatcttcgatgat

SEQ ID NO: 3023 - RNA, 20 nt, synthetic construct
  source 1..20: mol_type = other RNA; mol_type = other RNA
aaaccatgtgatatttgctt

SEQ ID NO: 3024 - RNA, 20 nt, synthetic construct
  source 1..20: mol_type = other RNA; mol_type = other RNA
atgttccacactttatttcc

SEQ ID NO: 3025 - RNA, 20 nt, synthetic construct
  source 1..20: mol_type = other RNA; mol_type = other RNA
tcacgttgaggagtggtgtt

SEQ ID NO: 3026 - RNA, 20 nt, synthetic construct
  source 1..20: mol_type = other RNA; mol_type = other RNA
cattgtctagggatataaag

SEQ ID NO: 3027 - RNA, 20 nt, synthetic construct
  source 1..20: mol_type = other RNA; mol_type = other RNA
acattgtctagggatataaa

SEQ ID NO: 3028 - RNA, 20 nt, synthetic construct
  source 1..20: mol_type = other RNA; mol_type = other RNA
gacattgtctagggatataa

SEQ ID NO: 3029 - RNA, 20 nt, synthetic construct
  source 1..20: mol_type = other RNA; mol_type = other RNA
tggccaggacattccatctt

SEQ ID NO: 3030 - RNA, 20 nt, synthetic construct
  source 1..20: mol_type = other RNA; mol_type = other RNA
ccattctaggaacaaaatat

SEQ ID NO: 3031 - RNA, 20 nt, synthetic construct
  source 1..20: mol_type = other RNA; mol_type = other RNA
gagcttccaagtcttctcca

SEQ ID NO: 3032 - RNA, 20 nt, synthetic construct
  source 1..20: mol_type = other RNA; mol_type = other RNA
tccccgaaaaggtcgaattt

SEQ ID NO: 3033 - RNA, 20 nt, synthetic construct
  source 1..20: mol_type = other RNA; mol_type = other RNA
atgaagaacagtcacaggac

SEQ ID NO: 3034 - RNA, 20 nt, synthetic construct
  source 1..20: mol_type = other RNA; mol_type = other RNA
gatttcgtctgtaggcacaa

SEQ ID NO: 3035 - RNA, 20 nt, synthetic construct
  source 1..20: mol_type = other RNA; mol_type = other RNA
taaacttacctgaaacagcc

SEQ ID NO: 3036 - RNA, 20 nt, synthetic construct
  source 1..20: mol_type = other RNA; mol_type = other RNA
attcagacagtgccttcatg

SEQ ID NO: 3037 - RNA, 20 nt, synthetic construct
  source 1..20: mol_type = other RNA; mol_type = other RNA
gttgcactcgattgggacag

SEQ ID NO: 3038 - RNA, 20 nt, synthetic construct
  source 1..20: mol_type = other RNA; mol_type = other RNA
ttatttcaagccctgattga

SEQ ID NO: 3039 - RNA, 20 nt, synthetic construct
  source 1..20: mol_type = other RNA; mol_type = other RNA
ttacctgtgtaacttttata

SEQ ID NO: 3040 - RNA, 20 nt, synthetic construct
  source 1..20: mol_type = other RNA; mol_type = other RNA
attgttcctggaatttgggg

SEQ ID NO: 3041 - RNA, 20 nt, synthetic construct
  source 1..20: mol_type = other RNA; mol_type = other RNA
gttcctggaatttggggagg

SEQ ID NO: 3042 - RNA, 20 nt, synthetic construct
  source 1..20: mol_type = other RNA; mol_type = other RNA
ctgccatgccgtaaggcaag

SEQ ID NO: 3043 - RNA, 20 nt, synthetic construct
  source 1..20: mol_type = other RNA; mol_type = other RNA
tctacctttggtgaacccgt

SEQ ID NO: 3044 - RNA, 20 nt, synthetic construct
  source 1..20: mol_type = other RNA; mol_type = other RNA
cttaccttagctccttctaa

SEQ ID NO: 3045 - RNA, 20 nt, synthetic construct
  source 1..20: mol_type = other RNA; mol_type = other RNA
gggatgtcgactcctagggg

SEQ ID NO: 3046 - RNA, 20 nt, synthetic construct
  source 1..20: mol_type = other RNA; mol_type = other RNA
cgagggcaccatgcttcaag

SEQ ID NO: 3047 - RNA, 20 nt, synthetic construct
  source 1..20: mol_type = other RNA; mol_type = other RNA
aaactcactttatgctaggg

SEQ ID NO: 3048 - RNA, 20 nt, synthetic construct
  source 1..20: mol_type = other RNA; mol_type = other RNA
ctcactttatgctagggagg

SEQ ID NO: 3049 - RNA, 20 nt, synthetic construct
  source 1..20: mol_type = other RNA; mol_type = other RNA
cttcacctgcatttaaagaa

SEQ ID NO: 3050 - RNA, 20 nt, synthetic construct
  source 1..20: mol_type = other RNA; mol_type = other RNA
ccaccagattagctctggcc

SEQ ID NO: 3051 - RNA, 20 nt, synthetic construct
  source 1..20: mol_type = other RNA; mol_type = other RNA
ctacctttggtgaacccgtt

SEQ ID NO: 3052 - RNA, 20 nt, synthetic construct
  source 1..20: mol_type = other RNA; mol_type = other RNA
atgttccagatgtccagata

SEQ ID NO: 3053 - RNA, 20 nt, synthetic construct
  source 1..20: mol_type = other RNA; mol_type = other RNA
tgttccagatgtccagatat

SEQ ID NO: 3054 - RNA, 20 nt, synthetic construct
  source 1..20: mol_type = other RNA; mol_type = other RNA
agatagacaaacaagttgga

SEQ ID NO: 3055 - RNA, 20 nt, synthetic construct
  source 1..20: mol_type = other RNA; mol_type = other RNA
agcttgcaccaagtcacatg

SEQ ID NO: 3056 - RNA, 20 nt, synthetic construct
  source 1..20: mol_type = other RNA; mol_type = other RNA
acccaccttggtgccttctc

SEQ ID NO: 3057 - RNA, 20 nt, synthetic construct
  source 1..20: mol_type = other RNA; mol_type = other RNA
tggagtacctgaggaatatc

SEQ ID NO: 3058 - RNA, 20 nt, synthetic construct
  source 1..20: mol_type = other RNA; mol_type = other RNA
ttaccccacttaactatctt

SEQ ID NO: 3059 - RNA, 18 nt, synthetic construct
  source 1..18: mol_type = other RNA; mol_type = other RNA
taccccacttaactatct

SEQ ID NO: 3060 - RNA, 20 nt, synthetic construct
  source 1..20: mol_type = other RNA; mol_type = other RNA
ctcaggtactccaaagattc

SEQ ID NO: 3061 - RNA, 20 nt, synthetic construct
  source 1..20: mol_type = other RNA; mol_type = other RNA
catttgccagacagaacctc

SEQ ID NO: 3062 - RNA, 20 nt, synthetic construct
  source 1..20: mol_type = other RNA; mol_type = other RNA
aaacaagaccaaaaggctaa

SEQ ID NO: 3063 - RNA, 20 nt, synthetic construct
  source 1..20: mol_type = other RNA; mol_type = other RNA
gtaagccaagaaagaaatcc

SEQ ID NO: 3064 - RNA, 20 nt, synthetic construct
  source 1..20: mol_type = other RNA; mol_type = other RNA
gcttcagattctgaatgagc

SEQ ID NO: 3065 - RNA, 20 nt, synthetic construct
  source 1..20: mol_type = other RNA; mol_type = other RNA
ttaaaacaaaatgaaatgaa

SEQ ID NO: 3066 - RNA, 20 nt, synthetic construct
  source 1..20: mol_type = other RNA; mol_type = other RNA
gttcctcagcttccttcaga

SEQ ID NO: 3067 - RNA, 20 nt, synthetic construct
  source 1..20: mol_type = other RNA; mol_type = other RNA
caaagagcaagagattctga

SEQ ID NO: 3068 - RNA, 20 nt, synthetic construct
  source 1..20: mol_type = other RNA; mol_type = other RNA
aaagagcaagagattctgaa

SEQ ID NO: 3069 - RNA, 20 nt, synthetic construct
  source 1..20: mol_type = other RNA; mol_type = other RNA
acacagcactatctgaaacc

SEQ ID NO: 3070 - RNA, 20 nt, synthetic construct
  source 1..20: mol_type = other RNA; mol_type = other RNA
cacccagaaaacaacacagc

SEQ ID NO: 3071 - RNA, 20 nt, synthetic construct
  source 1..20: mol_type = other RNA; mol_type = other RNA
taccaagttgaaatgaatca

SEQ ID NO: 3072 - RNA, 20 nt, synthetic construct
  source 1..20: mol_type = other RNA; mol_type = other RNA
atgaatcaagggcagtccca

SEQ ID NO: 3073 - RNA, 20 nt, synthetic construct
  source 1..20: mol_type = other RNA; mol_type = other RNA
agggcagtcccaaggtacag

SEQ ID NO: 3074 - RNA, 20 nt, synthetic construct
  source 1..20: mol_type = other RNA; mol_type = other RNA
gttccaaaaaccctcacacc

SEQ ID NO: 3075 - RNA, 20 nt, synthetic construct
  source 1..20: mol_type = other RNA; mol_type = other RNA
gaaacagcacttgaatcaac

SEQ ID NO: 3076 - RNA, 20 nt, synthetic construct
  source 1..20: mol_type = other RNA; mol_type = other RNA
attacaaataaagaataaag

SEQ ID NO: 3077 - RNA, 20 nt, synthetic construct
  source 1..20: mol_type = other RNA; mol_type = other RNA
taatgtccaaatgggactgg

SEQ ID NO: 3078 - RNA, 20 nt, synthetic construct
  source 1..20: mol_type = other RNA; mol_type = other RNA
caaagcaagatcttcttcac

SEQ ID NO: 3079 - RNA, 20 nt, synthetic construct
  source 1..20: mol_type = other RNA; mol_type = other RNA
acaacaagcttcagttctac

SEQ ID NO: 3080 - RNA, 20 nt, synthetic construct
  source 1..20: mol_type = other RNA; mol_type = other RNA
ctgcgcaacttgctcagcaa

SEQ ID NO: 3081 - RNA, 20 nt, synthetic construct
  source 1..20: mol_type = other RNA; mol_type = other RNA
cactcagacccctccccaga

SEQ ID NO: 3082 - RNA, 20 nt, synthetic construct
  source 1..20: mol_type = other RNA; mol_type = other RNA
tttttccatgttttgttttc

SEQ ID NO: 3083 - RNA, 20 nt, synthetic construct
  source 1..20: mol_type = other RNA; mol_type = other RNA
ttacctacacatctgcaaga

SEQ ID NO: 3084 - RNA, 20 nt, synthetic construct
  source 1..20: mol_type = other RNA; mol_type = other RNA
acacttacccacttagcaat

SEQ ID NO: 3085 - RNA, 20 nt, synthetic construct
  source 1..20: mol_type = other RNA; mol_type = other RNA
catgcagaatggcagcacat

SEQ ID NO: 3086 - RNA, 20 nt, synthetic construct
  source 1..20: mol_type = other RNA; mol_type = other RNA
aagctcaggaggagaaaaaa

SEQ ID NO: 3087 - RNA, 20 nt, synthetic construct
  source 1..20: mol_type = other RNA; mol_type = other RNA
cgcaagccaggctaaacagt

SEQ ID NO: 3088 - RNA, 20 nt, synthetic construct
  source 1..20: mol_type = other RNA; mol_type = other RNA
ttctccccagtctcagccga

SEQ ID NO: 3089 - RNA, 20 nt, synthetic construct
  source 1..20: mol_type = other RNA; mol_type = other RNA
tggtcaggaaaagcagccat

SEQ ID NO: 3090 - RNA, 20 nt, synthetic construct
  source 1..20: mol_type = other RNA; mol_type = other RNA
ctagtccagggtgtggcttc

SEQ ID NO: 3091 - RNA, 20 nt, synthetic construct
  source 1..20: mol_type = other RNA; mol_type = other RNA
ccccaaaatcaacatggcag

SEQ ID NO: 3092 - RNA, 20 nt, synthetic construct
  source 1..20: mol_type = other RNA; mol_type = other RNA
tgtgatccagcagccttctt

SEQ ID NO: 3093 - RNA, 20 nt, synthetic construct
  source 1..20: mol_type = other RNA; mol_type = other RNA
gaccagatcaaggccataag

SEQ ID NO: 3094 - RNA, 20 nt, synthetic construct
  source 1..20: mol_type = other RNA; mol_type = other RNA
caagacaagaaaagcatgaa

SEQ ID NO: 3095 - RNA, 20 nt, synthetic construct
  source 1..20: mol_type = other RNA; mol_type = other RNA
ctgaacagggactgttagga

SEQ ID NO: 3096 - RNA, 20 nt, synthetic construct
  source 1..20: mol_type = other RNA; mol_type = other RNA
ccagagctcagagtggcaac

SEQ ID NO: 3097 - RNA, 20 nt, synthetic construct
  source 1..20: mol_type = other RNA; mol_type = other RNA
ttgctgcagacgccccgtga

SEQ ID NO: 3098 - RNA, 20 nt, synthetic construct
  source 1..20: mol_type = other RNA; mol_type = other RNA
ctgcagacgccccgtgacgg

SEQ ID NO: 3099 - RNA, 20 nt, synthetic construct
  source 1..20: mol_type = other RNA; mol_type = other RNA
cgacaagcagtgcctttgct

SEQ ID NO: 3100 - RNA, 20 nt, synthetic construct
  source 1..20: mol_type = other RNA; mol_type = other RNA
gcccagaacgtgattgacta

SEQ ID NO: 3101 - RNA, 20 nt, synthetic construct
  source 1..20: mol_type = other RNA; mol_type = other RNA
tgtgccaggggtgttatgac

SEQ ID NO: 3102 - RNA, 20 nt, synthetic construct
  source 1..20: mol_type = other RNA; mol_type = other RNA
cagatccagtctgatggcag

SEQ ID NO: 3103 - RNA, 20 nt, synthetic construct
  source 1..20: mol_type = other RNA; mol_type = other RNA
tgtacacgatggtcagccat

SEQ ID NO: 3104 - RNA, 20 nt, synthetic construct
  source 1..20: mol_type = other RNA; mol_type = other RNA
ttttaccttggggctctgac

SEQ ID NO: 3105 - RNA, 20 nt, synthetic construct
  source 1..20: mol_type = other RNA; mol_type = other RNA
agccccaaggtaaaaaggcc

SEQ ID NO: 3106 - RNA, 20 nt, synthetic construct
  source 1..20: mol_type = other RNA; mol_type = other RNA
gagccccaaggtaaaaaggc

SEQ ID NO: 3107 - RNA, 20 nt, synthetic construct
  source 1..20: mol_type = other RNA; mol_type = other RNA
cagctcacagtgtgccacca

SEQ ID NO: 3108 - RNA, 20 nt, synthetic construct
  source 1..20: mol_type = other RNA; mol_type = other RNA
tatgaccagatggacctggc

SEQ ID NO: 3109 - RNA, 20 nt, synthetic construct
  source 1..20: mol_type = other RNA; mol_type = other RNA
actggaccagtatgtcttcc

SEQ ID NO: 3110 - RNA, 20 nt, synthetic construct
  source 1..20: mol_type = other RNA; mol_type = other RNA
tgtcttccaggactcccagc

SEQ ID NO: 3111 - RNA, 20 nt, synthetic construct
  source 1..20: mol_type = other RNA; mol_type = other RNA
ttcaaccaggagccagcctc

SEQ ID NO: 3112 - RNA, 20 nt, synthetic construct
  source 1..20: mol_type = other RNA; mol_type = other RNA
gaccagattcccagtatgtt

SEQ ID NO: 3113 - RNA, 20 nt, synthetic construct
  source 1..20: mol_type = other RNA; mol_type = other RNA
taacatactgggaatctggt

SEQ ID NO: 3114 - RNA, 20 nt, synthetic construct
  source 1..20: mol_type = other RNA; mol_type = other RNA
aaaggcactgcaagagacaa

SEQ ID NO: 3115 - RNA, 20 nt, synthetic construct
  source 1..20: mol_type = other RNA; mol_type = other RNA
ctctggcaaatctctgaggc

SEQ ID NO: 3116 - RNA, 20 nt, synthetic construct
  source 1..20: mol_type = other RNA; mol_type = other RNA
agccaagtaccccctcccag

SEQ ID NO: 3117 - RNA, 20 nt, synthetic construct
  source 1..20: mol_type = other RNA; mol_type = other RNA
acctcccgagcaaacatgac

SEQ ID NO: 3118 - RNA, 20 nt, synthetic construct
  source 1..20: mol_type = other RNA; mol_type = other RNA
ccttacctgtcatgtttgct

SEQ ID NO: 3119 - RNA, 20 nt, synthetic construct
  source 1..20: mol_type = other RNA; mol_type = other RNA
tgctctggagatggagaagc

SEQ ID NO: 3120 - RNA, 20 nt, synthetic construct
  source 1..20: mol_type = other RNA; mol_type = other RNA
cccacccaatgcccggcagc

SEQ ID NO: 3121 - RNA, 20 nt, synthetic construct
  source 1..20: mol_type = other RNA; mol_type = other RNA
aggccattttggaagcttgt

SEQ ID NO: 3122 - RNA, 20 nt, synthetic construct
  source 1..20: mol_type = other RNA; mol_type = other RNA
accggctctgcaaaggccag

SEQ ID NO: 3123 - RNA, 20 nt, synthetic construct
  source 1..20: mol_type = other RNA; mol_type = other RNA
tggtgcaggccaggctggag

SEQ ID NO: 3124 - RNA, 20 nt, synthetic construct
  source 1..20: mol_type = other RNA; mol_type = other RNA
gaacggcagctggcccaagg

SEQ ID NO: 3125 - RNA, 20 nt, synthetic construct
  source 1..20: mol_type = other RNA; mol_type = other RNA
ggcccaaggaggcctggctg

SEQ ID NO: 3126 - RNA, 20 nt, synthetic construct
  source 1..20: mol_type = other RNA; mol_type = other RNA
gacacgagtgattgctgtgc

SEQ ID NO: 3127 - RNA, 20 nt, synthetic construct
  source 1..20: mol_type = other RNA; mol_type = other RNA
ctggtcagggcaagagctat

SEQ ID NO: 3128 - RNA, 20 nt, synthetic construct
  source 1..20: mol_type = other RNA; mol_type = other RNA
gggcccacagccactcgtgg

SEQ ID NO: 3129 - RNA, 20 nt, synthetic construct
  source 1..20: mol_type = other RNA; mol_type = other RNA
ttccagaagaagctgctccg

SEQ ID NO: 3130 - RNA, 20 nt, synthetic construct
  source 1..20: mol_type = other RNA; mol_type = other RNA
cctggtccagagcctgagca

SEQ ID NO: 3131 - RNA, 20 nt, synthetic construct
  source 1..20: mol_type = other RNA; mol_type = other RNA
cagacatcaaagtaccctac

SEQ ID NO: 3132 - RNA, 20 nt, synthetic construct
  source 1..20: mol_type = other RNA; mol_type = other RNA
acatcaaagtaccctacagg

SEQ ID NO: 3133 - RNA, 20 nt, synthetic construct
  source 1..20: mol_type = other RNA; mol_type = other RNA
cgcccaggtcctcacgtctg

SEQ ID NO: 3134 - RNA, 20 nt, synthetic construct
  source 1..20: mol_type = other RNA; mol_type = other RNA
cttagtccaacacccaccgc

SEQ ID NO: 3135 - RNA, 20 nt, synthetic construct
  source 1..20: mol_type = other RNA; mol_type = other RNA
cctcctgcaatgcttcctgg

SEQ ID NO: 3136 - RNA, 20 nt, synthetic construct
  source 1..20: mol_type = other RNA; mol_type = other RNA
gagccagccacagggccccc

SEQ ID NO: 3137 - RNA, 20 nt, synthetic construct
  source 1..20: mol_type = other RNA; mol_type = other RNA
ggaagcagaaggtgcttgcg

SEQ ID NO: 3138 - RNA, 20 nt, synthetic construct
  source 1..20: mol_type = other RNA; mol_type = other RNA
ggctgcagccggggacactg

SEQ ID NO: 3139 - RNA, 20 nt, synthetic construct
  source 1..20: mol_type = other RNA; mol_type = other RNA
ctgccaaattccagcctcct

SEQ ID NO: 3140 - RNA, 20 nt, synthetic construct
  source 1..20: mol_type = other RNA; mol_type = other RNA
ggcgggccaagacttctccc

SEQ ID NO: 3141 - RNA, 20 nt, synthetic construct
  source 1..20: mol_type = other RNA; mol_type = other RNA
agactcagaggtgagaggag

SEQ ID NO: 3142 - RNA, 20 nt, synthetic construct
  source 1..20: mol_type = other RNA; mol_type = other RNA
agcctaggaggcaaagagca

SEQ ID NO: 3143 - RNA, 20 nt, synthetic construct
  source 1..20: mol_type = other RNA; mol_type = other RNA
cccccaggctttccccaaac

SEQ ID NO: 3144 - RNA, 20 nt, synthetic construct
  source 1..20: mol_type = other RNA; mol_type = other RNA
tcactccagatgctgcaggg

SEQ ID NO: 3145 - RNA, 20 nt, synthetic construct
  source 1..20: mol_type = other RNA; mol_type = other RNA
aggctgcaggtggaatcaga

SEQ ID NO: 3146 - RNA, 20 nt, synthetic construct
  source 1..20: mol_type = other RNA; mol_type = other RNA
cttcccccagctgaagtcct

SEQ ID NO: 3147 - RNA, 20 nt, synthetic construct
  source 1..20: mol_type = other RNA; mol_type = other RNA
cactcacttgagggtttcca

SEQ ID NO: 3148 - RNA, 20 nt, synthetic construct
  source 1..20: mol_type = other RNA; mol_type = other RNA
cagactgcggggacacagtg

SEQ ID NO: 3149 - RNA, 20 nt, synthetic construct
  source 1..20: mol_type = other RNA; mol_type = other RNA
ccactcaccttagcctgagc

SEQ ID NO: 3150 - RNA, 20 nt, synthetic construct
  source 1..20: mol_type = other RNA; mol_type = other RNA
gtacaagctgtcggaaacag

SEQ ID NO: 3151 - RNA, 20 nt, synthetic construct
  source 1..20: mol_type = other RNA; mol_type = other RNA
acactcactccatcacccgg

SEQ ID NO: 3152 - RNA, 20 nt, synthetic construct
  source 1..20: mol_type = other RNA; mol_type = other RNA
cactcactccatcacccgga

SEQ ID NO: 3153 - RNA, 20 nt, synthetic construct
  source 1..20: mol_type = other RNA; mol_type = other RNA
cgtccagtacaacaagttca

SEQ ID NO: 3154 - RNA, 20 nt, synthetic construct
  source 1..20: mol_type = other RNA; mol_type = other RNA
ccacatcctgcaagggggga

SEQ ID NO: 3155 - RNA, 20 nt, synthetic construct
  source 1..20: mol_type = other RNA; mol_type = other RNA
cacatcctgcaaggggggat

SEQ ID NO: 3156 - RNA, 20 nt, synthetic construct
  source 1..20: mol_type = other RNA; mol_type = other RNA
tgggcgtccacatcctgcaa

SEQ ID NO: 3157 - RNA, 20 nt, synthetic construct
  source 1..20: mol_type = other RNA; mol_type = other RNA
gggcgtccacatcctgcaag

SEQ ID NO: 3158 - RNA, 20 nt, synthetic construct
  source 1..20: mol_type = other RNA; mol_type = other RNA
ggcgtccacatcctgcaagg

SEQ ID NO: 3159 - RNA, 20 nt, synthetic construct
  source 1..20: mol_type = other RNA; mol_type = other RNA
gcgtccacatcctgcaaggg

SEQ ID NO: 3160 - RNA, 20 nt, synthetic construct
  source 1..20: mol_type = other RNA; mol_type = other RNA
gcccaaggtaagagcttccc

SEQ ID NO: 3161 - RNA, 20 nt, synthetic construct
  source 1..20: mol_type = other RNA; mol_type = other RNA
gctcttaccttgggcagcca

SEQ ID NO: 3162 - RNA, 20 nt, synthetic construct
  source 1..20: mol_type = other RNA; mol_type = other RNA
agctcttaccttgggcagcc

SEQ ID NO: 3163 - RNA, 20 nt, synthetic construct
  source 1..20: mol_type = other RNA; mol_type = other RNA
tgcacctctggggaggacct

SEQ ID NO: 3164 - RNA, 20 nt, synthetic construct
  source 1..20: mol_type = other RNA; mol_type = other RNA
ctgcacctctggggaggacc

SEQ ID NO: 3165 - RNA, 20 nt, synthetic construct
  source 1..20: mol_type = other RNA; mol_type = other RNA
cgcctgcagctgtcggacac

SEQ ID NO: 3166 - RNA, 20 nt, synthetic construct
  source 1..20: mol_type = other RNA; mol_type = other RNA
cacctgccaggccatcacgg

SEQ ID NO: 3167 - RNA, 20 nt, synthetic construct
  source 1..20: mol_type = other RNA; mol_type = other RNA
cctctgagaaggaaaaaaga

SEQ ID NO: 3168 - RNA, 20 nt, synthetic construct
  source 1..20: mol_type = other RNA; mol_type = other RNA
cagaggaacagtcccaagga

SEQ ID NO: 3169 - RNA, 20 nt, synthetic construct
  source 1..20: mol_type = other RNA; mol_type = other RNA
cactcacctgcccacagcag

SEQ ID NO: 3170 - RNA, 20 nt, synthetic construct
  source 1..20: mol_type = other RNA; mol_type = other RNA
ccactcacctgcccacagca

SEQ ID NO: 3171 - RNA, 20 nt, synthetic construct
  source 1..20: mol_type = other RNA; mol_type = other RNA
gccactcacctgcccacagc

SEQ ID NO: 3172 - RNA, 20 nt, synthetic construct
  source 1..20: mol_type = other RNA; mol_type = other RNA
agggcccctgtggggaaacg

SEQ ID NO: 3173 - RNA, 20 nt, synthetic construct
  source 1..20: mol_type = other RNA; mol_type = other RNA
gggcccctgtggggaaacga

SEQ ID NO: 3174 - RNA, 20 nt, synthetic construct
  source 1..20: mol_type = other RNA; mol_type = other RNA
gcaagtgcaggagtcagtga

SEQ ID NO: 3175 - RNA, 20 nt, synthetic construct
  source 1..20: mol_type = other RNA; mol_type = other RNA
cggaaccagtaaccatgaac

SEQ ID NO: 3176 - RNA, 20 nt, synthetic construct
  source 1..20: mol_type = other RNA; mol_type = other RNA
ggaaccagtaaccatgaact

SEQ ID NO: 3177 - RNA, 20 nt, synthetic construct
  source 1..20: mol_type = other RNA; mol_type = other RNA
gaaccagtaaccatgaactg

SEQ ID NO: 3178 - RNA, 20 nt, synthetic construct
  source 1..20: mol_type = other RNA; mol_type = other RNA
gctagatcaagaagtacagg

SEQ ID NO: 3179 - RNA, 20 nt, synthetic construct
  source 1..20: mol_type = other RNA; mol_type = other RNA
agaagtacaggaggagactc

SEQ ID NO: 3180 - RNA, 20 nt, synthetic construct
  source 1..20: mol_type = other RNA; mol_type = other RNA
caagtctagtgaggagaaag

SEQ ID NO: 3181 - RNA, 20 nt, synthetic construct
  source 1..20: mol_type = other RNA; mol_type = other RNA
aagtctagtgaggagaaaga

SEQ ID NO: 3182 - RNA, 20 nt, synthetic construct
  source 1..20: mol_type = other RNA; mol_type = other RNA
agtctagtgaggagaaagag

SEQ ID NO: 3183 - RNA, 20 nt, synthetic construct
  source 1..20: mol_type = other RNA; mol_type = other RNA
acaggcccaggacacagagc

SEQ ID NO: 3184 - RNA, 20 nt, synthetic construct
  source 1..20: mol_type = other RNA; mol_type = other RNA
acctgtcaggtgaagttcgc

SEQ ID NO: 3185 - RNA, 20 nt, synthetic construct
  source 1..20: mol_type = other RNA; mol_type = other RNA
acttacaggtgacgttgagc

SEQ ID NO: 3186 - RNA, 20 nt, synthetic construct
  source 1..20: mol_type = other RNA; mol_type = other RNA
aacatctaggagaggaagag

SEQ ID NO: 3187 - RNA, 20 nt, synthetic construct
  source 1..20: mol_type = other RNA; mol_type = other RNA
gttccacagaacccaacaac

SEQ ID NO: 3188 - RNA, 20 nt, synthetic construct
  source 1..20: mol_type = other RNA; mol_type = other RNA
ttcctacctgagccatctcc

SEQ ID NO: 3189 - RNA, 20 nt, synthetic construct
  source 1..20: mol_type = other RNA; mol_type = other RNA
atgctcacatgaagaagatg

SEQ ID NO: 3190 - RNA, 20 nt, synthetic construct
  source 1..20: mol_type = other RNA; mol_type = other RNA
gggaaacaagagaccagagc

SEQ ID NO: 3191 - RNA, 20 nt, synthetic construct
  source 1..20: mol_type = other RNA; mol_type = other RNA
tcactctgatgggagacacc

SEQ ID NO: 3192 - RNA, 20 nt, synthetic construct
  source 1..20: mol_type = other RNA; mol_type = other RNA
cactctgatgggagacacca

SEQ ID NO: 3193 - RNA, 20 nt, synthetic construct
  source 1..20: mol_type = other RNA; mol_type = other RNA
tttcttatggagaggaaaga

SEQ ID NO: 3194 - RNA, 20 nt, synthetic construct
  source 1..20: mol_type = other RNA; mol_type = other RNA
gtacaggtaagagcaacgcc

SEQ ID NO: 3195 - RNA, 20 nt, synthetic construct
  source 1..20: mol_type = other RNA; mol_type = other RNA
ttacctgtaccataaccagg

SEQ ID NO: 3196 - RNA, 20 nt, synthetic construct
  source 1..20: mol_type = other RNA; mol_type = other RNA
tgtatctgtaggaggagaag

SEQ ID NO: 3197 - RNA, 20 nt, synthetic construct
  source 1..20: mol_type = other RNA; mol_type = other RNA
gtatctgtaggaggagaagt

SEQ ID NO: 3198 - RNA, 20 nt, synthetic construct
  source 1..20: mol_type = other RNA; mol_type = other RNA
cagatacaaactggactctc

SEQ ID NO: 3199 - RNA, 20 nt, synthetic construct
  source 1..20: mol_type = other RNA; mol_type = other RNA
tcttaccttccttcgtttgc

SEQ ID NO: 3200 - RNA, 20 nt, synthetic construct
  source 1..20: mol_type = other RNA; mol_type = other RNA
tttggatctaaaacggtgac

SEQ ID NO: 3201 - RNA, 20 nt, synthetic construct
  source 1..20: mol_type = other RNA; mol_type = other RNA
gatctaaaacggtgacaggt

SEQ ID NO: 3202 - RNA, 20 nt, synthetic construct
  source 1..20: mol_type = other RNA; mol_type = other RNA
aaaggctcagcagttgacct

SEQ ID NO: 3203 - RNA, 20 nt, synthetic construct
  source 1..20: mol_type = other RNA; mol_type = other RNA
atttaccggcatagaatagt

SEQ ID NO: 3204 - RNA, 20 nt, synthetic construct
  source 1..20: mol_type = other RNA; mol_type = other RNA
tcactgcctaagagagacat

SEQ ID NO: 3205 - RNA, 20 nt, synthetic construct
  source 1..20: mol_type = other RNA; mol_type = other RNA
aggatccacgtggagaatgg

SEQ ID NO: 3206 - RNA, 20 nt, synthetic construct
  source 1..20: mol_type = other RNA; mol_type = other RNA
ggatccacgtggagaatggt

SEQ ID NO: 3207 - RNA, 20 nt, synthetic construct
  source 1..20: mol_type = other RNA; mol_type = other RNA
tctcactgttctcagggaag

SEQ ID NO: 3208 - RNA, 20 nt, synthetic construct
  source 1..20: mol_type = other RNA; mol_type = other RNA
cctgcccaaggcttcccacc

SEQ ID NO: 3209 - RNA, 20 nt, synthetic construct
  source 1..20: mol_type = other RNA; mol_type = other RNA
ctgcccaaggcttcccacct

SEQ ID NO: 3210 - RNA, 20 nt, synthetic construct
  source 1..20: mol_type = other RNA; mol_type = other RNA
gcctgctgcggtaagcggta

SEQ ID NO: 3211 - RNA, 20 nt, synthetic construct
  source 1..20: mol_type = other RNA; mol_type = other RNA
gatgctcagggaacacgtat

SEQ ID NO: 3212 - RNA, 20 nt, synthetic construct
  source 1..20: mol_type = other RNA; mol_type = other RNA
ttctcaaagttcccacatcc

SEQ ID NO: 3213 - RNA, 20 nt, synthetic construct
  source 1..20: mol_type = other RNA; mol_type = other RNA
tcacagattggtgagtagcc

SEQ ID NO: 3214 - RNA, 20 nt, synthetic construct
  source 1..20: mol_type = other RNA; mol_type = other RNA
ctcacctgttctgtgattac

SEQ ID NO: 3215 - RNA, 20 nt, synthetic construct
  source 1..20: mol_type = other RNA; mol_type = other RNA
tccttccagctactcaatcc

SEQ ID NO: 3216 - RNA, 20 nt, synthetic construct
  source 1..20: mol_type = other RNA; mol_type = other RNA
cacagtacaaataagagccc

SEQ ID NO: 3217 - RNA, 20 nt, synthetic construct
  source 1..20: mol_type = other RNA; mol_type = other RNA
ccccccagcgcttcggtgag

SEQ ID NO: 3218 - RNA, 20 nt, synthetic construct
  source 1..20: mol_type = other RNA; mol_type = other RNA
cccccagcgcttcggtgagt

SEQ ID NO: 3219 - RNA, 20 nt, synthetic construct
  source 1..20: mol_type = other RNA; mol_type = other RNA
ccactcaccgaagcgctggg

SEQ ID NO: 3220 - RNA, 20 nt, synthetic construct
  source 1..20: mol_type = other RNA; mol_type = other RNA
tacctcggaggaaagagaaa

SEQ ID NO: 3221 - RNA, 20 nt, synthetic construct
  source 1..20: mol_type = other RNA; mol_type = other RNA
cagcttccaaaacgacaagc

SEQ ID NO: 3222 - RNA, 20 nt, synthetic construct
  source 1..20: mol_type = other RNA; mol_type = other RNA
aacataccagcttgtcgttt

SEQ ID NO: 3223 - RNA, 20 nt, synthetic construct
  source 1..20: mol_type = other RNA; mol_type = other RNA
agaccacctgcagagacgag

SEQ ID NO: 3224 - RNA, 20 nt, synthetic construct
  source 1..20: mol_type = other RNA; mol_type = other RNA
ccacctgcagagacgagagg

SEQ ID NO: 3225 - RNA, 20 nt, synthetic construct
  source 1..20: mol_type = other RNA; mol_type = other RNA
ccacacccaaaaggccacac

SEQ ID NO: 3226 - RNA, 20 nt, synthetic construct
  source 1..20: mol_type = other RNA; mol_type = other RNA
cccaccagctcagctccacg

SEQ ID NO: 3227 - RNA, 20 nt, synthetic construct
  source 1..20: mol_type = other RNA; mol_type = other RNA
cgctgtcaagtccagttcta

SEQ ID NO: 3228 - RNA, 20 nt, synthetic construct
  source 1..20: mol_type = other RNA; mol_type = other RNA
gctgtcaagtccagttctac

SEQ ID NO: 3229 - RNA, 20 nt, synthetic construct
  source 1..20: mol_type = other RNA; mol_type = other RNA
cacccagatcgtcagcgccg

SEQ ID NO: 3230 - RNA, 20 nt, synthetic construct
  source 1..20: mol_type = other RNA; mol_type = other RNA
ccactcacctgctctacccc

SEQ ID NO: 3231 - RNA, 20 nt, synthetic construct
  source 1..20: mol_type = other RNA; mol_type = other RNA
ccacagtctgaaagaaagca

SEQ ID NO: 3232 - RNA, 20 nt, synthetic construct
  source 1..20: mol_type = other RNA; mol_type = other RNA
gacactgttggcacggagga

SEQ ID NO: 3233 - RNA, 20 nt, synthetic construct
  source 1..20: mol_type = other RNA; mol_type = other RNA
ttaccatggccatcaacaca

SEQ ID NO: 3234 - RNA, 20 nt, synthetic construct
  source 1..20: mol_type = other RNA; mol_type = other RNA
ccacagtctgaaagaaaaca

SEQ ID NO: 3235 - RNA, 20 nt, synthetic construct
  source 1..20: mol_type = other RNA; mol_type = other RNA
cacagtctgaaagaaaacag

SEQ ID NO: 3236 - RNA, 20 nt, synthetic construct
  source 1..20: mol_type = other RNA; mol_type = other RNA
ttaccatggccatcagcacg

SEQ ID NO: 3237 - RNA, 20 nt, synthetic construct
  source 1..20: mol_type = other RNA; mol_type = other RNA
tctgcgttcaggggtaagcg

SEQ ID NO: 3238 - RNA, 20 nt, synthetic construct
  source 1..20: mol_type = other RNA; mol_type = other RNA
gcgcttacccctgaacgcag

SEQ ID NO: 3239 - RNA, 20 nt, synthetic construct
  source 1..20: mol_type = other RNA; mol_type = other RNA
gactgggcagcggcccctgt

SEQ ID NO: 3240 - RNA, 20 nt, synthetic construct
  source 1..20: mol_type = other RNA; mol_type = other RNA
ggactgggcagcggcccctg

SEQ ID NO: 3241 - RNA, 20 nt, synthetic construct
  source 1..20: mol_type = other RNA; mol_type = other RNA
gtcatgcagcccttgcctgc

SEQ ID NO: 3242 - RNA, 20 nt, synthetic construct
  source 1..20: mol_type = other RNA; mol_type = other RNA
tcatgcagcccttgcctgct

SEQ ID NO: 3243 - RNA, 20 nt, synthetic construct
  source 1..20: mol_type = other RNA; mol_type = other RNA
catgcagcccttgcctgctg

SEQ ID NO: 3244 - RNA, 20 nt, synthetic construct
  source 1..20: mol_type = other RNA; mol_type = other RNA
ctcaccagattcccgaaggt

SEQ ID NO: 3245 - RNA, 20 nt, synthetic construct
  source 1..20: mol_type = other RNA; mol_type = other RNA
cagactcaccagattcccga

SEQ ID NO: 3246 - RNA, 20 nt, synthetic construct
  source 1..20: mol_type = other RNA; mol_type = other RNA
agcctaggcaagtgcagagg

SEQ ID NO: 3247 - RNA, 20 nt, synthetic construct
  source 1..20: mol_type = other RNA; mol_type = other RNA
cagcctaggcaagtgcagag

SEQ ID NO: 3248 - RNA, 20 nt, synthetic construct
  source 1..20: mol_type = other RNA; mol_type = other RNA
accagcctaggcaagtgcag

SEQ ID NO: 3249 - RNA, 20 nt, synthetic construct
  source 1..20: mol_type = other RNA; mol_type = other RNA
tggaaccccaataccagcct

SEQ ID NO: 3250 - RNA, 20 nt, synthetic construct
  source 1..20: mol_type = other RNA; mol_type = other RNA
cacctgcagaagatgccaga

SEQ ID NO: 3251 - RNA, 20 nt, synthetic construct
  source 1..20: mol_type = other RNA; mol_type = other RNA
cgctcacctgcaccagcctc

SEQ ID NO: 3252 - RNA, 20 nt, synthetic construct
  source 1..20: mol_type = other RNA; mol_type = other RNA
cttcctggcaagacacaaga

SEQ ID NO: 3253 - RNA, 20 nt, synthetic construct
  source 1..20: mol_type = other RNA; mol_type = other RNA
aattcagggagccattgaaa

SEQ ID NO: 3254 - RNA, 20 nt, synthetic construct
  source 1..20: mol_type = other RNA; mol_type = other RNA
ctactgacctgccttttcaa

SEQ ID NO: 3255 - RNA, 20 nt, synthetic construct
  source 1..20: mol_type = other RNA; mol_type = other RNA
gcctctcaaagtcttatgtg

SEQ ID NO: 3256 - RNA, 20 nt, synthetic construct
  source 1..20: mol_type = other RNA; mol_type = other RNA
ttcccatgctgctttacttc

SEQ ID NO: 3257 - RNA, 20 nt, synthetic construct
  source 1..20: mol_type = other RNA; mol_type = other RNA
tttaggtcaaccagatgtag

SEQ ID NO: 3258 - RNA, 20 nt, synthetic construct
  source 1..20: mol_type = other RNA; mol_type = other RNA
tgtgcctgaaagcaaaaatg

SEQ ID NO: 3259 - RNA, 20 nt, synthetic construct
  source 1..20: mol_type = other RNA; mol_type = other RNA
ttacctactattcttgccag

SEQ ID NO: 3260 - RNA, 20 nt, synthetic construct
  source 1..20: mol_type = other RNA; mol_type = other RNA
aaatgctgtttaaaaaaagg

SEQ ID NO: 3261 - RNA, 20 nt, synthetic construct
  source 1..20: mol_type = other RNA; mol_type = other RNA
ccccaaaaagtgaatatcaa

SEQ ID NO: 3262 - RNA, 20 nt, synthetic construct
  source 1..20: mol_type = other RNA; mol_type = other RNA
cgcggcgcagtacccgctgc

SEQ ID NO: 3263 - RNA, 20 nt, synthetic construct
  source 1..20: mol_type = other RNA; mol_type = other RNA
cactcaccgtggtgggtcgg

SEQ ID NO: 3264 - RNA, 20 nt, synthetic construct
  source 1..20: mol_type = other RNA; mol_type = other RNA
actcaccgtggtgggtcgga

SEQ ID NO: 3265 - RNA, 20 nt, synthetic construct
  source 1..20: mol_type = other RNA; mol_type = other RNA
tggctccctgtggggcaacg

SEQ ID NO: 3266 - RNA, 20 nt, synthetic construct
  source 1..20: mol_type = other RNA; mol_type = other RNA
gattccagggggaggcggtg

SEQ ID NO: 3267 - RNA, 20 nt, synthetic construct
  source 1..20: mol_type = other RNA; mol_type = other RNA
gctcctacctgtgctggacc

SEQ ID NO: 3268 - RNA, 20 nt, synthetic construct
  source 1..20: mol_type = other RNA; mol_type = other RNA
tcgccgccacagtggggtcg

SEQ ID NO: 3269 - RNA, 20 nt, synthetic construct
  source 1..20: mol_type = other RNA; mol_type = other RNA
cagactgagagtggggagag

SEQ ID NO: 3270 - RNA, 20 nt, synthetic construct
  source 1..20: mol_type = other RNA; mol_type = other RNA
cctcctccagagtgtggttg

SEQ ID NO: 3271 - RNA, 20 nt, synthetic construct
  source 1..20: mol_type = other RNA; mol_type = other RNA
agccatcccagggagagagc

SEQ ID NO: 3272 - RNA, 20 nt, synthetic construct
  source 1..20: mol_type = other RNA; mol_type = other RNA
gccatcccagggagagagct

SEQ ID NO: 3273 - RNA, 20 nt, synthetic construct
  source 1..20: mol_type = other RNA; mol_type = other RNA
ccatcccagggagagagctg

SEQ ID NO: 3274 - RNA, 20 nt, synthetic construct
  source 1..20: mol_type = other RNA; mol_type = other RNA
ctcacaggccacccaccagc

SEQ ID NO: 3275 - RNA, 20 nt, synthetic construct
  source 1..20: mol_type = other RNA; mol_type = other RNA
ccgcttccagaagtgcctgg

SEQ ID NO: 3276 - RNA, 20 nt, synthetic construct
  source 1..20: mol_type = other RNA; mol_type = other RNA
cttccagaagtgcctggcgg

SEQ ID NO: 3277 - RNA, 20 nt, synthetic construct
  source 1..20: mol_type = other RNA; mol_type = other RNA
acaactgcaaaggaatgggt

SEQ ID NO: 3278 - RNA, 20 nt, synthetic construct
  source 1..20: mol_type = other RNA; mol_type = other RNA
caactgcaaaggaatgggta

SEQ ID NO: 3279 - RNA, 20 nt, synthetic construct
  source 1..20: mol_type = other RNA; mol_type = other RNA
gaactaggaagacggtccag

SEQ ID NO: 3280 - RNA, 20 nt, synthetic construct
  source 1..20: mol_type = other RNA; mol_type = other RNA
ggctgaccaggacctgttgc

SEQ ID NO: 3281 - RNA, 20 nt, synthetic construct
  source 1..20: mol_type = other RNA; mol_type = other RNA
ctcacctgtacgccaggcgg

SEQ ID NO: 3282 - RNA, 20 nt, synthetic construct
  source 1..20: mol_type = other RNA; mol_type = other RNA
gctctcacctgtacgccagg

SEQ ID NO: 3283 - RNA, 20 nt, synthetic construct
  source 1..20: mol_type = other RNA; mol_type = other RNA
cttagacctggcaggcagat

SEQ ID NO: 3284 - RNA, 20 nt, synthetic construct
  source 1..20: mol_type = other RNA; mol_type = other RNA
caatccagtccccgaagcca

SEQ ID NO: 3285 - RNA, 20 nt, synthetic construct
  source 1..20: mol_type = other RNA; mol_type = other RNA
aatccagtccccgaagccac

SEQ ID NO: 3286 - RNA, 20 nt, synthetic construct
  source 1..20: mol_type = other RNA; mol_type = other RNA
actcaccggtgatgaggaca

SEQ ID NO: 3287 - RNA, 20 nt, synthetic construct
  source 1..20: mol_type = other RNA; mol_type = other RNA
ctcaccggtgatgaggacaa

SEQ ID NO: 3288 - RNA, 20 nt, synthetic construct
  source 1..20: mol_type = other RNA; mol_type = other RNA
ccggtctgcgggaagggtac

SEQ ID NO: 3289 - RNA, 20 nt, synthetic construct
  source 1..20: mol_type = other RNA; mol_type = other RNA
tgggctgcaggagccgcggc

SEQ ID NO: 3290 - RNA, 20 nt, synthetic construct
  source 1..20: mol_type = other RNA; mol_type = other RNA
ttgtaccaaatgcccctgtc

SEQ ID NO: 3291 - RNA, 20 nt, synthetic construct
  source 1..20: mol_type = other RNA; mol_type = other RNA
cggacagcagtcctccatta

SEQ ID NO: 3292 - RNA, 20 nt, synthetic construct
  source 1..20: mol_type = other RNA; mol_type = other RNA
aggtgcagcacagccccatg

SEQ ID NO: 3293 - RNA, 20 nt, synthetic construct
  source 1..20: mol_type = other RNA; mol_type = other RNA
ggtgcagcacagccccatgt

SEQ ID NO: 3294 - RNA, 20 nt, synthetic construct
  source 1..20: mol_type = other RNA; mol_type = other RNA
agttgccagatgcgcttcga

SEQ ID NO: 3295 - RNA, 20 nt, synthetic construct
  source 1..20: mol_type = other RNA; mol_type = other RNA
gttgccagatgcgcttcgac

SEQ ID NO: 3296 - RNA, 20 nt, synthetic construct
  source 1..20: mol_type = other RNA; mol_type = other RNA
gtctcagctgctcgacacgc

SEQ ID NO: 3297 - RNA, 20 nt, synthetic construct
  source 1..20: mol_type = other RNA; mol_type = other RNA
ttcttaccctggaatagtcc

SEQ ID NO: 3298 - RNA, 20 nt, synthetic construct
  source 1..20: mol_type = other RNA; mol_type = other RNA
attacctgtatgctaatcga

SEQ ID NO: 3299 - RNA, 20 nt, synthetic construct
  source 1..20: mol_type = other RNA; mol_type = other RNA
ttgcaatgcgttcgtggctt

SEQ ID NO: 3300 - RNA, 20 nt, synthetic construct
  source 1..20: mol_type = other RNA; mol_type = other RNA
actgacctgtgaccatagcc

SEQ ID NO: 3301 - RNA, 20 nt, synthetic construct
  source 1..20: mol_type = other RNA; mol_type = other RNA
tatctgcagggacagagaaa

SEQ ID NO: 3302 - RNA, 20 nt, synthetic construct
  source 1..20: mol_type = other RNA; mol_type = other RNA
tgcggcgcagacatacagct

SEQ ID NO: 3303 - RNA, 20 nt, synthetic construct
  source 1..20: mol_type = other RNA; mol_type = other RNA
ccccgcaggcgggggcgtta

SEQ ID NO: 3304 - RNA, 20 nt, synthetic construct
  source 1..20: mol_type = other RNA; mol_type = other RNA
tttcagaagtgtctcagtgt

SEQ ID NO: 3305 - RNA, 20 nt, synthetic construct
  source 1..20: mol_type = other RNA; mol_type = other RNA
attacctgatggaaagtctg

SEQ ID NO: 3306 - RNA, 20 nt, synthetic construct
  source 1..20: mol_type = other RNA; mol_type = other RNA
cttcagtgccttcgtggatt

SEQ ID NO: 3307 - RNA, 20 nt, synthetic construct
  source 1..20: mol_type = other RNA; mol_type = other RNA
tttctgcagagggatagaga

SEQ ID NO: 3308 - RNA, 20 nt, synthetic construct
  source 1..20: mol_type = other RNA; mol_type = other RNA
agaccaccagagtaagggac

SEQ ID NO: 3309 - RNA, 20 nt, synthetic construct
  source 1..20: mol_type = other RNA; mol_type = other RNA
acttgcagccctcggccaaa

SEQ ID NO: 3310 - RNA, 20 nt, synthetic construct
  source 1..20: mol_type = other RNA; mol_type = other RNA
gcttgcagctgtgggacacc

SEQ ID NO: 3311 - RNA, 20 nt, synthetic construct
  source 1..20: mol_type = other RNA; mol_type = other RNA
gaccactcaaccagtgccca

SEQ ID NO: 3312 - RNA, 20 nt, synthetic construct
  source 1..20: mol_type = other RNA; mol_type = other RNA
ggaggcacagaccactccac

SEQ ID NO: 3313 - RNA, 20 nt, synthetic construct
  source 1..20: mol_type = other RNA; mol_type = other RNA
ggcacagacaactcgactga

SEQ ID NO: 3314 - RNA, 20 nt, synthetic construct
  source 1..20: mol_type = other RNA; mol_type = other RNA
gcacagaccactcaacccac

SEQ ID NO: 3315 - RNA, 20 nt, synthetic construct
  source 1..20: mol_type = other RNA; mol_type = other RNA
gaccactcaacccacaggcc

SEQ ID NO: 3316 - RNA, 20 nt, synthetic construct
  source 1..20: mol_type = other RNA; mol_type = other RNA
gaccactcaaaccacagcca

SEQ ID NO: 3317 - RNA, 20 nt, synthetic construct
  source 1..20: mol_type = other RNA; mol_type = other RNA
gaccactcaacccacagcca

SEQ ID NO: 3318 - RNA, 20 nt, synthetic construct
  source 1..20: mol_type = other RNA; mol_type = other RNA
gaccactcaaccagcagcca

SEQ ID NO: 3319 - RNA, 20 nt, synthetic construct
  source 1..20: mol_type = other RNA; mol_type = other RNA
tttactatgtctcagtggat

SEQ ID NO: 3320 - RNA, 20 nt, synthetic construct
  source 1..20: mol_type = other RNA; mol_type = other RNA
ctttactatgtctcagtgga

SEQ ID NO: 3321 - RNA, 20 nt, synthetic construct
  source 1..20: mol_type = other RNA; mol_type = other RNA
agccagaagctgggaatttc

SEQ ID NO: 3322 - RNA, 20 nt, synthetic construct
  source 1..20: mol_type = other RNA; mol_type = other RNA
tatcatgtcgttattaactg

SEQ ID NO: 3323 - RNA, 20 nt, synthetic construct
  source 1..20: mol_type = other RNA; mol_type = other RNA
cacctacctaagaaccatcc

SEQ ID NO: 3324 - RNA, 20 nt, synthetic construct
  source 1..20: mol_type = other RNA; mol_type = other RNA
ggacccagactagcagcacc

SEQ ID NO: 3325 - protein, 153 aa, synthetic construct
MALPVTALLLPLALLLHAARPRANCHQEPSVCLQAACPESWIGFQRKCFYFSDDTKNWTSSQRFCDSQDADLAQVESFQELNFLLRYKGPSDHWIGLSREQGQPWKWINGTEWTRQFPILGAGECAYLNDKGASSARHYTERKWICSKSDIHV

SEQ ID NO: 3326 - protein, 152 aa, synthetic construct
MYRMQLLSCIALSLALVTNSRANCHQEPSVCLQAACPESWIGFQRKCFYFSDDTKNWTSSQRFCDSQDADLAQVESFQELNFLLRYKGPSDHWIGLSREQGQPWKWINGTEWTRQFPILGAGECAYLNDKGASSARHYTERKWICSKSDIHV

SEQ ID NO: 3327 - protein, 155 aa, synthetic construct
MKYTSYILAFQLCIVLGSLGCYCRANCHQEPSVCLQAACPESWIGFQRKCFYFSDDTKNWTSSQRFCDSQDADLAQVESFQELNFLLRYKGPSDHWIGLSREQGQPWKWINGTEWTRQFPILGAGECAYLNDKGASSARHYTERKWICSKSDIHV

SEQ ID NO: 3328 - DNA, 459 bp, synthetic construct
  source 1..459: mol_type = other DNA
atggccctgcccgtgaccgccctgctgctgcccctggccctgctgctgcacgccgccaggccccgggccaattgtcatcaggaaccaagtgtgtgccttcaggccgcgtgtcctgaatcatggataggctttcaacggaagtgtttttatttttccgacgacactaaaaactggactagtagtcaacggttttgcgattctcaagatgcggatcttgcccaagtggagtccttccaagagttgaattttcttcttcgatataaaggtccttcagaccattggatagggttgtccagggaacagggacaaccgtggaagtggataaacggcacagaatggacccggcagttccctatattgggcgcgggcgagtgcgcttacctcaatgacaaaggcgcttcatctgccagacattacacggaacgaaagtggatctgtagtaagtccgatattcacgtc

SEQ ID NO: 3329 - DNA, 456 bp, synthetic construct
  source 1..456: mol_type = other DNA
atgtaccggatgcagctcctgtcttgtatagcactttctcttgcgttggtaactaatagccgggccaattgtcatcaggaaccaagtgtgtgccttcaggccgcgtgtcctgaatcatggataggctttcaacggaagtgtttttatttttccgacgacactaaaaactggactagtagtcaacggttttgcgattctcaagatgcggatcttgcccaagtggagtccttccaagagttgaattttcttcttcgatataaaggtccttcagaccattggatagggttgtccagggaacagggacaaccgtggaagtggataaacggcacagaatggacccggcagttccctatattgggcgcgggcgagtgcgcttacctcaatgacaaaggcgcttcatctgccagacattacacggaacgaaagtggatctgtagtaagtccgatattcacgtc

SEQ ID NO: 3330 - DNA, 465 bp, synthetic construct
  source 1..465: mol_type = other DNA
atgaaatacacgtcctacatccttgcgtttcaactttgtattgtactgggttcactgggctgctactgtcgggccaattgtcatcaggaaccaagtgtgtgccttcaggccgcgtgtcctgaatcatggataggctttcaacggaagtgtttttatttttccgacgacactaaaaactggactagtagtcaacggttttgcgattctcaagatgcggatcttgcccaagtggagtccttccaagagttgaattttcttcttcgatataaaggtccttcagaccattggatagggttgtccagggaacagggacaaccgtggaagtggataaacggcacagaatggacccggcagttccctatattgggcgcgggcgagtgcgcttacctcaatgacaaaggcgcttcatctgccagacattacacggaacgaaagtggatctgtagtaagtccgatattcacgtc

SEQ ID NO: 3331 - protein, 20 aa, synthetic construct
MYRMQLLSCIALSLALVTNS

SEQ ID NO: 3332 - protein, 23 aa, synthetic construct
MKYTSYILAFQLCIVLGSLGCYC

SEQ ID NO: 3333 - RNA, 20 nt, synthetic construct
  source 1..20: mol_type = other RNA
ctcacagtacacggtgagga

SEQ ID NO: 3334 - RNA, 20 nt, synthetic construct
  source 1..20: mol_type = other RNA
gttactcacagtacacggtg

SEQ ID NO: 3335 - RNA, 20 nt, synthetic construct
  source 1..20: mol_type = other RNA
ttcctgcagggactccagaa

SEQ ID NO: 3336 - RNA, 20 nt, synthetic construct
  source 1..20: mol_type = other RNA
tcctgcagggactccagaac

SEQ ID NO: 3337 - RNA, 20 nt, synthetic construct
  source 1..20: mol_type = other RNA
tgcagggactccagaacggg

SEQ ID NO: 3338 - RNA, 20 nt, synthetic construct
  source 1..20: mol_type = other RNA
cctcaccaaaggtctggagc

SEQ ID NO: 3339 - RNA, 20 nt, synthetic construct
  source 1..20: mol_type = other RNA
ttcaatcctcaccaaaggtc

SEQ ID NO: 3340 - RNA, 20 nt, synthetic construct
  source 1..20: mol_type = other RNA
ctgccccttcttactgtaga

SEQ ID NO: 3341 - RNA, 20 nt, synthetic construct
  source 1..20: mol_type = other RNA
tgtgcctattccaggctttc

SEQ ID NO: 3342 - RNA, 20 nt, synthetic construct
  source 1..20: mol_type = other RNA
ttttccagatggcccccgac

SEQ ID NO: 3343 - RNA, 20 nt, synthetic construct
  source 1..20: mol_type = other RNA
tcactcacagagcacattca

SEQ ID NO: 3344 - protein, 12 aa, synthetic construct
EGGSEEEEESGS

SEQ ID NO: 3345 - protein, 12 aa, synthetic construct
KGPKPKKEESEK

SEQ ID NO: 3346 - RNA, 86 nt, synthetic construct
  source 1..86: mol_type = other RNA
gttttagagctgtgttgaaaaacacagcaagttaaaataaggctttgtccgtatccaacttgaaaaagtgagcaccgattcggtgc

SEQ ID NO: 3347 - RNA, 78 nt, synthetic construct
  source 1..78: mol_type = other RNA
gttttagagctggaaacagcaagttaaaataaggctttgtccgtatccaacttgaaaaagtgagcaccgattcggtgc

SEQ ID NO: 3348 - RNA, 76 nt, synthetic construct; identical to SEQ ID NO: 319
  source 1..76: mol_type = other RNA

SEQ ID NO: 3349 - protein, 1380 aa, synthetic construct
MKKPYSIGLDIGTNSVGWAVITDDYKVPAKKMKVLGNTDRSHIKKNLIGALLFDAGNTAEDRRLKRTARRRYTRRRNRILYLQEIFAEEMNKIDESFFHRLDDSFLVPEDKRGSKYPIFATLQEEKEYHKQFPTIYHLRKQLAESNEKADLRLVYLALAHMIKYRGHFLIDDPKFKVQNNDIQGLFEKFVEEYDNVQETSLSKIKLNVTEILTAKIPKSEKQEQLLKNYPSEKKNTLFGNLIGLALGLTPNFKTNFSLENDAKLQISSESYEEDLGSLLALIGENFIELFSAVKNLSDGILLAGIVSDESPHAPLSTKMVIRFKEHEEDLAALKHFIKANLPEKYDEVFSDDSKNGYAGYVGVDSKVRKRNGKLATEEEFYKYLKDILNNVKGADYFLEKIKREDLLRKQRTFDNGTIPYQVHLEEMKAILQNQGEYYPFLKENKEKIQQILTFRIPYYVGPLARGNRDFAWLTRNSDQAIRPWNFEEVVDKASSAEDFINKMTNYDLYLPEEKVLPKHSLLYETFAVYNELTKVKFIAEGLRDYQFLDSGQKKQIVNQLFKEKRKVTEKDIIHYLHNVDGYDGIELKGIEKQFNASLSTYHDLLKIIKDKEFMDDPKNEEILENIVHTLTIFEDREMIKQRLAQYDSLFDEKVIKALTRRHYTGWGKLSAKLINGICDKQTNKTILDFLIDDDKINRNFMQLINDDGLSFKDIIQKAQVVGKIDDVKQVVQELPGSPAIKKGILQSIKIVDELVKVMGHAPESIVIEMARENQTTARGKKNSQQRYKRIEDALKNLAPGLDSNILKENPTDNIQLQNDRLFLYYLQNGKDMYTGEALDINQLSNYDIDHIVPQAFIKDDSLDNRVLTSSKDNRGKSDNVPSIEVVQKRKAFWQQLLDSKLISERKFNNLTKAERGGLDERDKVGFIKRQLVETRQITKHVAQILDARFNTEVNEKNQKIRKVKIITLKSNLVSNFRKEFGLYKVREINDYHHAHDAYLNAVVAKAILKKYPKLEPEFVYGDYQKYDLKRYISRSKDPKEIEKATEKYFFYSNLLNFFKEEVHYADGTIIKRENIEYSKDTGEIAWNKEKDFATVRKVLSCPQVNIVKKTEVQTGGFSKESILPKRNSDKLIARKKDWDPKKYGGFDSPTVAYSVLVVAKVEKGKSKKLKSVKELVGITIMERSSFEKDPVDFLEAKGYKEVRKDLIIKLPKYSLFELENGRKRMLASAGELQKGNELALPSKYVNFLYLASHYEKLKGSPEDNEQKQLFVEQHKHYLDEIIEQISEFSKRVILADANLDKVLSAYNKHRDKPIREQAENIIHLFTLTNLGAPAAFKYFDTTIDRKRYTSTKEVLDATLIHQSITGLYETRIDLSQLGGD

SEQ ID NO: 3350 - DNA, 4140 bp, synthetic construct
  source 1..4140: mol_type = other DNA
atgaagaagccttattccatcggcttggacatcgggactaactccgtcggatgggctgtgattaccgacgactacaaggttcccgcaaaaaagatgaaagtgctcggcaatacagatcggtcacatattaagaagaacctgattggcgctctgcttttcgatgcaggtaatactgccgaggataggcgcctcaagagaacagcccggcgtagatacactcgcagaaggaaccggattctgtacctgcaagaaatttttgctgaagaaatgaataagatcgatgagtcattcttccaccgactggacgatagtttcctggtacctgaagacaaaaggggatccaagtaccccatttttgccacactccaagaagagaaggagtaccacaagcaatttccgaccatctaccaccttaggaagcagctggcagagtccaacgaaaaggcagacttgcggttagtctacctggctcttgcacacatgataaagtaccggggacatttcttaattgacgaccctaagtttaaagttcagaataacgatattcaaggcctcttcgaaaagtttgttgaggaatatgataacgtacaagaaacctctttgtctaaaattaagctcaatgtgactgagatcctcacagcaaagattcccaaaagcgagaaacaagagcaactcctgaagaactaccctagtgagaaaaagaacaccctttttggcaatctgatcgggctcgccctgggcctgacacctaacttcaaaacaaatttctccctggagaacgacgccaagctgcaaatctcatccgagagttacgaggaagacttaggatctctcctcgcactgattggagaaaacttcattgaactcttctccgccgtgaaaaatctgagtgacggcatccttctggccggaatcgtctctgacgagagtccccacgcgccgctgagcacaaagatggtcatccggttcaaagagcacgaagaagatctcgcggcactcaaacatttcatcaaagccaacttgccagaaaaatacgatgaagtattctccgacgatagcaaaaacggctatgcgggatacgtaggagtcgacagcaaggtgcggaagcgcaatggtaagcttgctacagaagaagaattttacaagtaccttaaagatatcctcaataatgttaagggggccgactacttcctcgaaaagatcaaaagggaggacctgttgaggaaacagcgtacctttgacaacggcacaatcccgtaccaggtgcacctcgaagaaatgaaagccattctgcagaaccagggggaatactatccattcctcaaggaaaacaaggaaaaaatccagcagatccttacgtttaggattccttactatgtgggccctttggcaaggggtaaccgggatttcgcttggctcaccaggaatagtgaccaggccataaggccctggaactttgaagaagtcgtcgacaaggcctcttccgccgaagacttcattaacaaaatgactaactacgatctctacctgccagaggaaaaagtccttccaaaacatagcctgctttacgaaaccttcgccgtatacaacgagcttacaaaagtcaagttcatcgcagagggtctcagggattaccaattccttgactctggccaaaaaaagcagatcgtgaatcaacttttcaaggagaaacgaaaggtgactgaaaaggacatcattcactacctgcacaacgtcgatggatacgacgggattgaactgaagggcatagaaaagcagttcaatgctagtttgtccacgtaccacgatctgcttaaaatcattaaggataaggaattcatggatgaccctaagaacgaagagattttggaaaacatcgtccacaccctgaccattttcgaggatagggagatgataaagcaacggctggcacagtacgactcactttttgacgagaaggtgataaaagcccttacaagaaggcattataccgggtggggcaagctctccgctaagctgatcaatggtatttgcgacaagcagaccaataagactattttggacttcctgattgacgatgataagataaaccgaaactttatgcagctgattaatgatgatggactgagctttaaagatatcattcagaaggcccaggtcgtcggcaagatcgacgacgtcaaacaggtggtgcaggaacttccaggatccccggccattaagaagggaatattacagtccatcaaaattgtggatgagctggtgaaagtcatgggacatgcacctgagtctatcgtcatagagatggctcgtgaaaaccagacgacagcccgaggaaagaagaacagccaacaacggtataaacggatcgaggatgcacttaagaatctggccccggggctggattctaatatcttaaaagaaaatccaaccgataatattcaacttcagaacgaccggctttttctgtattaccttcagaatggaaaagatatgtataccggagaagccctggatataaatcagctgagtaactatgatatcgaccacattgtgcctcaggctttcattaaggatgacagcctggacaatcgcgtactcacatcctccaaggacaacagaggcaagagcgataacgtccctagcatcgaagtggtacaaaagcgtaaggccttctggcagcagctcttagactctaaattgataagcgaacggaaattcaataacctcacaaaggccgagcgtggtggcttggacgagagagacaaggtgggcttcattaaacggcagctcgtggaaaccagacagataaccaagcacgttgcccagatcctcgatgccaggttcaacaccgaagttaacgagaaaaaccaaaagattcggaaagtgaagatcatcactctcaagtctaatttggtgtccaactttagaaaagagtttggactctataaggtccgagagattaatgattatcaccacgctcacgatgcctacctcaacgcagtggtggccaaggccatcctgaaaaaatatcctaagctcgagcctgagttcgtctatggtgactatcagaagtacgacctcaagcgctatattagtaggagcaaggatcctaaagagatcgaaaaggccacagaaaagtacttcttttacagcaacttactcaacttcttcaaagaagaagtccactacgctgatggcaccatcatcaagcgagaaaatatagagtacagtaaggacacaggcgaaatcgcctggaataaagagaaggatttcgctactgtgcgaaaagttctgtcttgcccccaggtgaacattgtgaaaaagactgaggtgcagactggcgggtttagcaaagagagtatcctgccaaagcggaatagcgataagttaattgctcggaaaaaggactgggatccaaagaagtacggcggcttcgattccccaaccgttgcctacagcgtcctcgtcgtcgccaaggtggagaagggtaaaagcaagaagctgaaaagtgtaaaggaactggtcggcattaccattatggagcggagttccttcgaaaaggatccagttgattttttagaagccaaggggtataaggaggtgcgcaaggatttaattattaaactccccaagtacagcctgtttgagctggagaacggaaggaagaggatgctggctagcgccggcgagctccaaaagggcaatgagctcgccctgccaagcaagtacgtgaactttctctatctggctagccactacgagaagctgaagggatcacctgaagacaatgagcagaaacagctgttcgtcgagcagcataaacactacctcgacgaaattattgagcaaattagtgagttctcaaagcgggtaatcctcgcagatgcaaatctggataaagtgttaagcgcgtataataagcaccgggacaaaccaatccgggagcaagccgagaacatcattcatctcttcacactgaccaatcttggggctcctgcagcttttaaatatttcgatacaaccatcgacaggaagcgatatacttctacaaaggaagtgcttgatgcaactctcatccatcaaagcatcacggggctgtatgaaacccggattgacctgagtcagctgggtggggac

SEQ ID NO: 3351 - protein, 166 aa, synthetic construct
SEVEFSHEYWMRHALTLAKRARDEREVPVGAVLVLNNRVIGEGWNRAIGLHDPTAHAEIMALRQGGLVMQNYRLIDATLYVTFEPCVMCAGAMIHSRIGRVVFGVRNSKRGAAGSLMNVLNYPGMNHRVEITEGILADECAALLCDFYRMPRQVFNAQKKAQSSIN

SEQ ID NO: 3352 - protein, 166 aa, synthetic construct
SEVEFSHEYWMRHALTLAKRARDEGEVPVGAVLVLNNRVIGEGWNRAIGLYDPTAHAEIMALRQGGLVMQNYRLIDATLYVTFEPCVMCAGAMIHSRIGRVVFGVRNSKRGAAGSLMNVLNYPGMDHRVEITEGILADECAALLCDFYRMPRQVFNAQKKAQSSIN

SEQ ID NO: 3353 - protein, 166 aa, synthetic construct
SEVEFSHEYWMRHALTLAKRARDEGEVPVGAVLVLNNRVIGEGWNRAIGLHDPTAHAEIMALRQGGLVMQNYRLIDATLYVTFEPCVMCAGAMIHSRIGRVVFGVRNSKRGAAGSLMNVLNYPGMDHRVEITEGILADECAALLCDFYRMPRQVFNAQKKAQSSIN

SEQ ID NO: 3354 - protein, 166 aa, synthetic construct
SEVEFSHEYWMRHALTLAKRARDEREVPVGAVLVLNNRVIGEGWNRAIGLHDPTAHAEIMALRQGGLVMQNYGLIDATLYVTFEPCVMCAGAIIHSRIGRVVFGVRNSKRGAAGSLMNVLNYPGMNHRVEITEGILADECAALLCDFYRMPRQVFNAQKKAQSSIN

SEQ ID NO: 3355 - protein, 166 aa, synthetic construct
SEVEFSHEYWMRHALTLAKRARDEREVPVGAVLVLNNRVIGEGWNRAIGLHDPTAHAEIMALRQGGLVMQNYRLIDATLYVTFEPCVMCAGAMIHSRIGRVVFGVRNSKRGAAGSLMNVLNYPGMDHRVEITEGILADECAALLCDFYRMPRQVFNAQKKAQSSIN

SEQ ID NO: 3356 - protein, 166 aa, synthetic construct
SEVEFSHEYWMRHALTLAKRARDEGEVPVGAVLVLNNRVIGEGWNRAIGLYDPTAHAEIMALRQGGLVMQNYGLIDATLYVTFEPCVMCAGAMIHSRIGRVVFGVRNSKRGAAGSLMNVLNYPGMDHRVEITEGILADECAALLCDFYRMPRQVFNAQKKAQSSIN

SEQ ID NO: 3357 - protein, 166 aa, synthetic construct
SEVEFSHEYWMRHALTLAKRARDEGEVPVGAVLVLNNRVIGEGWNRAIGLYDPTAHAEIMALRQGGLVMQNYGLIDATLYSTFEPCVMCAGAMIHSRIGRVVFGVRNSKRGAAGSLMNVLNYPGMDHRVEITEGILADECAALLCDFYRMPRRVFNAQKKAQSSIN

SEQ ID NO: 3358 - protein, 166 aa, synthetic construct
SEVEFSHEYWMRHALTLAKRARDEGEVPVGAVLVLNNRVIGEGWNRAIGLYDPTAHAEIMALRQGGLVMQNYRLIDATLYVTFEPCVMCAGAMIHSRIGRVVFGVRNSKRGAAGSLMNVLNYPGMDHRVEITEGILANECAALLCDFYRMPRQVFNAQKKAQSSIN

SEQ ID NO: 3359 - protein, 166 aa, synthetic construct
SEVEFSHEYWMRHALTLAKRARDEREVPVGAVLVLNNRVIGEGWNRAIGLHDPTAHAEIMALRQGGLVMQNYRLYDATLYSTFEPCVMCAGAMIHSRIGRVVFGVRNAKTGAAGSLMDVLHHPGMNHRVEITEGILADECAALLCRFFRMPRRVFNAQKKAQSSTD

SEQ ID NO: 3360 - protein, 160 aa, Staphylococcus aureus; identical to SEQ ID NO: 309

SEQ ID NO: 3361 - protein, 161 aa, Bacillus subtilis; identical to SEQ ID NO: 310

SEQ ID NO: 3362 - protein, 183 aa, Salmonella enterica; identical to SEQ ID NO: 311
  source 1..183: note = serovar Typhimurium

SEQ ID NO: 3363 - protein, 164 aa, Shewanella putrefaciens; identical to SEQ ID NO: 312

SEQ ID NO: 3364 - protein, 173 aa, Haemophilus influenzae; identical to SEQ ID NO: 313

SEQ ID NO: 3365 - protein, 161 aa, Caulobacter crescentus; identical to SEQ ID NO: 314

SEQ ID NO: 3366 - protein, 178 aa, Geobacter sulfurreducens
MSSLKKTPIRDDAYWMGKAIREAAKAAARDEVPIGAVIVRDGAVIGRGHNLREGSNDPSAHAEMIAIRQAARRSANWRLTGATLYVTLEPCLMCMGAIILARLERVVFGCYDPKGAAGSLYDLSADPRLNHQVRLSPGVCQEECGTMLSDFFRDLRRRKKAKATPALFIDERKVPPEP

SEQ ID NO: 3367 - protein, 171 aa, Streptococcus pyogenes
MPYSLEEQTYFMQEALKEAEKSLQKAEIPIGCVIVKDGEIIGRGHNAREESNQAIMHAEIMAINEANAHEGNWRLLDTTLFVTIEPCVMCSGAIGLARIPHVIYGASNQKFGGADSLYQILTDERLNHRVQVERGLLAADCANIMQTFFRQGRERKKIAKHLIKEQSDPFD

SEQ ID NO: 3368 - protein, 151 aa, Aquifex aeolicus
MGKEYFLKVALREAKRAFEKGEVPVGAIIVKEGEIISKAHNSVEELKDPTAHAEMLAIKEACRRLNTKYLEGCELYVTLEPCIMCSYALVLSRIEKVIFSALDKKHGGVVSVFNILDEPTLNHRVKWEYYPLEEASELLSEFFKKLRNNII

SEQ ID NO: 3369 - protein, 178 aa, Escherichia coli
MRRAFITGVFFLSEVEFSHEYWMRHALTLAKRAWDEREVPVGAVLVHNNRVIGEGWNRPIGRHDPTAHAEIMALRQGGLVMQNYRLIDATLYVTLEPCVMCAGAMIHSRIGRVVFGARDAKTGAAGSLMDVLHHPGMNHRVEITEGILADECAALLSDFFRMRRQEIKAQKKAQSSTD

SEQ ID NO: 3370 - protein, 473 aa, synthetic construct
MSRSVALAVLALLSLSGLEAVMAPRTLILGCGGSGGGGSGGGGSIQRTPKIQVYSRHPAENGKSNFLNCYVSGFHPSDIEVDLLKNGERIEKVEHSDLSFSKDWSFYLLYYTEFTPTEKDEYACRVNHVTLSQPKIVKWDRDMGGGGSGGGGSGGGGSGGGGSGSHSLKYFHTSVSRPGRGEPRFISVGYVDDTQFVRFDNDAASPRMVPRAPWMEQEGSEYWDRETRSARDTAQIFRVNLRTLRGCYNQSEAGSHTLQWMHGCELGPDGRFLRGYEQFAYDGKDYLTLNEDLRSWTAVDTAAQISEQKSNDASEAEHQRAYLEDTCVEWLHKYLEKGKETLLHLEPPKTHVTHHPISDHEATLRCWALGFYPAEITLTWQQDGEGHTQDTELVETRPAGDGTFQKWAAVVVPSGEEQRYTCHVQHEGLPEPVTLRWKPASQPTIPIMALIVLGGVAGLLLFIGLGIFFCVRC